(19) United States
(12) Patent Application Publication
(10) Pub. No.: US 2015/0168401 A1
(43) Pub. Date: Jun. 18, 2015

(54) Compositions And Methods For Immunodominant Antigens of Mycobacterium Tuberculosis

(71) Applicant: IMMPORT THERAPEUTICS, INC., IRVINE, CA (US)

(72) Inventors: Philip Felgner, Rancho Santa Fe, CA (US); Xiaowu Liang, La Jolla, CA (US); Maria Laura Gennaro, New York, NY (US)

(21) Appl. No.: 14/512,454

(22) Filed: Oct. 12, 2014

Related U.S. Application Data
(62) Division of application No. 13/681,224, filed on Nov. 19, 2012, now Pat. No. 8,883,431.
Application No. 13/681,224 is a division of application No. 13/396,213, filed on Feb. 14, 2012, now Pat. No. 8,329,418.
Application No. 13/396,213 is a division of application No. 13/077,561, filed on Mar. 31, 2011, now Pat. No. 8,114,614.
Application No. 13/077,561 is a division of application No. 12/465,136, filed on May 13, 2009, now Pat. No. 7,927,818.
Application No. 12/465,136 is a continuation-in-part of application No. 12/447,620, filed on Dec. 3, 2009.
(60) Provisional application No. 60/856,217, filed on Nov. 1, 2006.

(51) Int. Cl. G01N 33/569

(52) U.S. Cl. CPC G01N 33/5695; G01N 2469/20

(57) ABSTRACT

Contemplated compositions, devices, and methods are drawn to various antigens from the pathogen M. tuberculosis and their use in vaccines, therapeutic agents, and various diagnostic tests. In particularly preferred aspects, the antigens are immunodominant and have quantified and known relative reactivities with respect to sera of a population infected with the pathogen, and/or have a known association with a disease parameter.

[0001] This application is a divisional application of allowed U.S. application Ser. No. 13/681,224 filed Nov. 19, 2012, which is a divisional application Ser. No. 13/396,213, filed Feb. 14, 2012, which is issued as U.S. Pat. No. 8,329,418, which is a divisional application of U.S. application Ser. No. 13/077,561, filed Mar. 31, 2011, which issued as U.S. Pat. No. 8,114,614, which is a divisional of U.S. application Ser. No. 12/465,136, filed May 13, 2009, which issued as U.S. Pat. No. 7,927,818, which is continuation-in-part of our copending U.S. application Ser. No. 12/447,620 filed Dec. 3, 2009, which is a U.S. national phase filing of International Application No. PCT/US07/23299, which was filed Nov. 1, 2007 which claims priority to U.S. Provisional Application No. 60/856,217, which was filed Nov. 1, 2006, all of which are incorporated by reference herein in their entirety.

### FIELD OF THE INVENTION

[0002] The field of the invention is compositions and methods related to selected antigens from Mycobacterium tuberculosis, especially as they relate to their use in diagnostic and therapeutic compositions and methods.

### BACKGROUND

[0003] Antigens for vaccination and/or diagnostic purposes are typically single antigens from a pathogen, or complex mixtures of multiple known antigens from a pathogen, or of multiple known and unknown antigens of a pathogen such as live, attenuated or inactivated bacteria or viruses. Depending on the particular type of pathogen, single antigens may provide a quantifiable signal in immunodiagnostic tests (antibody or cellular responses). However, due to variations among individuals in their immune response profiles, single antigen tests are often not sufficient to obtain useful diagnostic information with useful specificity and sensitivity.

[0004] For example, multiple tests are often required for accurate diagnosis of tuberculosis (TB). Most typically, a person suspected of being infected with M. tuberculosis is tested using the tuberculin skin test (TST) that often provides variable results, which make their interpretation rarely consistent. Alternative tests are the interferon gamma release assays (IGRAs). These tests are more specific that TST but they still do not provide means of distinguishing persons having active tuberculosis from persons who are infected but are not currently harboring an active disease process. For investigation of active TB, a sputum smear test for acid fast bacilli can be employed to identify M. tuberculosis directly, which tends to provide good specificity. However, the sensitivity varies widely among different laboratories. To obtain a more definite result, active TB may be diagnosed by bacterial culture from, e.g., sputum or other bodily fluids. Unfortunately, such test requires a dedicated microbiology laboratory and several weeks to obtain the results. More recently developed methods, such as real time PCR assays are relatively accurate but require sophisticated equipment and highly trained personnel, and they are very susceptible to cross-sample contamination.

[0005] Based on the above drawbacks it is therefore desirable to develop an antibody-based test that would overcome at least some of the difficulties associated with bacterial culture, genetic analysis or other known methods, and considerable effort has been spent defining and identifying immunoreactive proteins in membrane fractions of M. tuberculosis and M. tuberculosis-conditioned culture medium (‘culture filtrate proteins’ or CFPs). Candidate antigens are typically tested for diagnostic utility in ELISAs and Western blots using TB sera and sera from healthy controls. CFPs are more widely studied because of the convenience of working with soluble proteins. Of the >100 M. tuberculosis proteins in culture filtrates (representing about 2.5% of the M. tuberculosis proteome), roughly two dozen are recognized by sera from TB patients, most of which have been previously identified. Yet despite these efforts, there remains no effective serological test with the sensitivity and specificity required to accurately diagnose TB, particularly in the early stage of infection. Moreover, none of the heretofore known antigens is generally applicable to differentiate among stages (e.g., active disease versus non-active), secondary infections, etc., as the signal is either impossible to deconvolute (e.g., compound signal from inactivated pathogen) or only provides a single data point.

[0006] Similarly, where known antigens are used in a vaccine, numerous problems are known due to the variability of individual immune response and potential prior exposure. More recently, multivalent vaccine preparations have become available where in a single dose, multiple and distinct antigens, from multiple and distinct serotypes, of a single pathogenic organisms were combined (Prevnar™: Heptavalent vaccine against Streptococcus pneumoniae capsular serotypes 4, 6B, 9V, 14, 18C, 19F, and 23F). While such mixed preparations tend to provide a broader range of protection against different serotypes, various difficulties nevertheless remain. Most significantly, where a single antigen fails to elicit an immune response, coverage to the corresponding serotype is not present. Thus, combination of single defined antigens from several serotypes merely combines benefits and problems associated with the single antigens.

[0007] Therefore, while numerous methods of identification and use of antigens are known in the art, all or almost all of them suffer from one or more disadvantages. Consequently, there remains a large, unmet need to provide improved compositions and methods of antigens from M. tuberculosis for diagnosis and therapy of TB.

### SUMMARY OF THE INVENTION

[0008] The present invention is directed to immunodominant antigens from M. tuberculosis wherein the antigens are known to react, that is, have known reactivities (and particularly known relative reactivities) to serum of a population of patients infected with the pathogen. Thus, the antigens presented herein will have a statistically high probability to elicit an immune response in a relatively large group of patients. Further, where the antigens are determined from selected sub-populations (e.g., active stage, latent stage, past infection, prior vaccination, not infected, co-infection with other pathogen, etc.), the antigens may also have a known association with a disease parameter.

[0009] In aspect of the inventive subject matter, an antigen composition comprises a plurality of antigens of M. tuberculosis encoded by nucleic acids selected from the group consisting of SEQ ID NO:1 to SEQ ID NO:586 (or any subgroup of such sequences), or fragments thereof, wherein at least two of the antigens elicit an immune response.

[0010] In other contemplated aspects of the inventive subject matter, an antigen composition comprises two or more immunodominant antigens of a pathogenic organism and are associated with a carrier, wherein the antigens have quantified and known relative reactivities with respect to sera of a population infected with the organism, and wherein the antigens have a known association with a disease parameter. Most preferably, immunodominant antigens are polypeptides and are encoded by nucleic acids having a sequence according to SEQ ID NO:1 to SEQ ID NO:586 (or comprise fragments thereof).

[0011] It is further contemplated that the known reactivities may be characterized by a variety of factors, however, it is particularly preferred that the known reactivities are characterized by strength of immunogenicity and/or time course of the infection. It is generally preferred that the parameter is activity state of the disease, a previous exposure to the pathogen, the duration of exposure to the pathogen, a chronic infection, past disease, active infection, inactive infection, at least partial immunity to infection with the pathogen, and/or outcome upon treatment.

[0012] In another aspect of the inventive subject matter, the carrier is a pharmaceutically acceptable carrier, and the composition is formulated as a vaccine. In such aspects, it is generally preferred that the vaccine comprises multiple (e.g., at least two, four, or six) antigens. It is still further contemplated that the antigens or fragments thereof are at least partially purified and/or recombinant.

[0013] In further contemplated aspects, the carrier may also be a solid carrier, and the plurality of antigens is disposed on the carrier either as a mixture or as an array. In such arrays, it is generally preferred that the antigens have at least two distinct known reactivities and/or parameters. It is also contemplated that the antigens or fragments thereof may be in crude expression extracts, in partially purified form (e.g., purity of less than 60%), or in highly purified form (e.g., purity of at least 95%). The antigens in such arrays may be recombinant or native. Alternatively, solid phases need not be limited to planar arrays, but may also include beads, columns, dipstick-type formats, etc.

[0014] Aspects of this invention include diagnostic assay utilizing at least two immunodominant antigens of M. tuberculosis. Antibody assays comprise contacting a sample of bodily fluid that contains antibodies against M. tuberculosis, for example, serum, with at least two immunodominant antigens of this invention and detecting antigen-antibody binding by any satisfactory method, preferably by formation of a color or generation of a fluorescent signal. For example, antigens immobilized on a solid surface, either individually in discrete areas or in a mixture, may be used to immobilize antibodies from the sample, and an anti-antibody linked directly or indirectly to a color-forming enzyme may then be added for signal generation in the standard ELISA format. Alternatively, fluorescence signals may be generated by methods such as linking (directly or indirectly) an anti-antibody to a fluorescence-emitting substance. Aspects of this invention also include use of at least two immunodominant antigens free in solution rather than immobilized on a surface. For example, a sample of peripheral blood, a bodily fluid containing T-lymphocytes, may be contacted with such antigens in vitro. Reactions between T-lymphocytes and antigen (on an antigen-presenting cell) are, like antigen-antibody reactions, epitope-specific even though T-lymphocytes and antibodies may recognize different epitopes. If the antigens are recognized, the T-lymphocytes produce at least one cytokine, such as interferon gamma, which is then detected by a (directly or indirectly) labeled antibody. Aspects of this invention further include kits of reagents for performing assays. Such kits include at least two immunodominant antigens according to this invention.

[0015] Various objects, features, aspects and advantages of the inventive subject matter will become more apparent from the following detailed description of preferred embodiments, along with the accompanying drawing figures in which like numerals represent like components.

### BRIEF DESCRIPTION OF THE DRAWING

[0016] FIGS. 1A and 1B depict exemplary microarrays probed with sera from TB-positive and LTBI-negative (i.e., not infected with M. tuberculosis) individuals, respectively.

[0017] FIGS. 2A and 2B are graphs depicting exemplary statistical representations in differences in signals for TB-positive and LTBI-negative results.

[0018] FIG. 2C is a table listing selected TB antigens using one preferred exemplary ranking algorithm.

[0019] FIGS. 3A and 3B depict exemplary fluorimetric and colorimetric visualization of exemplary microarrays and respective scatter plots indicating the correlation between the visualizations.

[0020] FIGS. 4A and 4B depict the proteins ranking in random forests, CERNO, and random forests with CERNO-prefiltered data.

[0021] FIG. 5 depicts a protein which exhibits a tail distribution of higher intensity signals in TB samples that is not seen in non-TB samples.

### DETAILED DESCRIPTION

[0022] The inventors have discovered various immunodominant antigens from M. tuberculosis that are suitable for diagnostic and therapeutic purposes. Particularly preferred immunodominant antigens and are those encoded by nucleic acids having a sequence according to SEQ ID NO:1 to SEQ ID NO:586, and it is generally contemplated that such antigens can be used as single antigens, or in combination (optionally also in combination with antigens from another pathogen) in the manufacture of various diagnostic devices, therapeutic compositions, and vaccines. Preferably, the immunodominant antigens suitable for diagnostic and therapeutic purposes are encoded by the sequences designated Rv0798c (SEQ ID NO:121), Rv1886c (SEQ ID NO:270), Rv2031c (SEQ ID NO:284), Rv3616c (SEQ ID NO:509), Rv3804c (SEQ ID NO:534), Rv3874 (SEQ ID NO:547), Rv0302 (SEQ ID NO:52), Rv0379 (SEQ ID NO:65), Rv0394c (SEQ ID NO:66), Rv0456c (SEQ ID NO:74), Rv0632c (SEQ ID NO:103), Rv0944 (SEQ ID NO:142), Rv0984(SEQ ID NO:146), Rv1030 (SEQ ID NO:153), Rv1196 (SEQ ID NO:174), Rv1242 (SEQ ID NO:180), Rv1284 (SEQ ID NO:187), Rv1387 (SEQ ID NO:206), Rv1837c (SEQ ID NO:264), Rv1926c (SEQ ID NO:275), Rv1980c (SEQ ID NO:281), Rv2094c (SEQ ID NO:294), Rv2544 (SEQ ID NO:363), Rv2618 (SEQ ID NO:375), Rv2746c (SEQ ID NO:391), Rv2870c (SEQ ID NO:407), Rv2873 (SEQ ID NO:408), Rv2875 (SEQ ID NO:409), Rv3050c (SEQ ID NO:434), Rv3248c (SEQ ID NO:458), Rv3376 (SEQ ID NO:478), Rv3763 (SEQ ID NO:527), Rv3810 (SEQ ID NO:536), Rv3864 (SEQ ID NO:545), Rv2252 (SEQ ID NO:323), Rv2282c (SEQ ID NO:569), Rv0212c (SEQ ID NO:557), Rv3243c (SEQ ID NO:456), Rv3675 (SEQ ID NO:519), Rv2984 (SEQ ID NO:423), Rv1175c (SEQ ID NO:169), Rv3326 (SEQ ID NO:578), Rv3628 (SEQ ID NO:513), Rv3775 (SEQ ID NO:584), Rv3362c (SEQ ID NO:475), Rv0801 (SEQ ID NO:122), Rv1629 (SEQ ID NO:566), Rv0272c (SEQ ID NO:558), Rv3762c (SEQ ID NO:583), Rv3319 (SEQ ID NO:577), Rv3495c (SEQ ID NO:581), Rv2151c (SEQ ID NO:308), Rv0227c(SEQ ID NO:37),Rv0280(SEQ ID NO:50), Rv0993 (SEQ ID NO:148), Rv1306 (SEQ ID NO:192), Rv1363c (SEQ ID NO:204), Rv2050 (SEQ ID NO:288), Rv2116 (SEQ ID NO:299), Rv3417c (SEQ ID NO:486), Rv3653 (SEQ ID NO:516), Rv1253 (SEQ ID NO:182), Rv3413c (SEQ ID NO:485), Rv1635c (SEQ ID NO:232), Rv3021c (SEQ ID NO:432), Rv1193 (SEQ ID NO:173), Rv2592c (SEQ ID NO:369), Rv3620c (SEQ ID NO:510), Rv0929 (SEQ ID NO:139), Rv0959 (SEQ ID NO:145), Rv1162 (SEQ ID NO:166), Rv2389c (SEQ ID NO:341), Rv2984 (SEQ ID NO:423), Rv2588c (SEQ ID NO:367), Rv0171 (SEQ ID NO:26), Rv1865c (SEQ ID NO:267), Rv2074 (SEQ ID NO:290), Rv0543c (SEQ ID NO:87), Rv1677 (SEQ ID NO:237), Rv1304 (SEQ ID NO:191), Rv2841c (SEQ ID NO:400), Rv3680 (SEQ ID NO:520), Rv0831c (SEQ ID NO:125), Rv2032 (SEQ ID NO:285), Rv3127 (SEQ ID NO:446), Rv3272 (SEQ ID NO:464), Rv3323c (SEQ ID NO:470), Rv3508 (SEQ ID NO:494), Rv3628 (SEQ ID NO:513), Rv1173 (SEQ ID NO:167), Rv2623 (SEQ ID NO:376), Rv0527 (SEQ ID NO:85), Rv1620c (SEQ ID NO:229), Rv1901 (SEQ ID NO:272), Rv2151c (SEQ ID NO:308),Rv0362 (SEQ ID NO:60), Rv3129 (SEQ ID NO:447), Rv3140 (SEQ ID NO:449), Rv0340 (SEQ ID NO:56), Rv2792c (SEQ ID NO:395), Rv3003c (SEQ ID NO:426), Rv3019c (SEQ ID NO:431), Rv3862c (SEQ ID NO:544), Rv0572c (SEQ ID NO:91), Rv2477c (SEQ ID NO:356), Rv2659c (SEQ ID NO:379), Rv0311 (SEQ ID NO:54), Rv0350 (SEQ ID NO:57), Rv2127 (SEQ ID NO:301), Rv3875 (SEQ ID NO:548), Rv0877 (SEQ ID NO:134), Rv1916 (SEQ ID NO:274), Rv2138 (SEQ ID NO:303), Rv2847c (SEQ ID NO:403), Rv3118 (SEQ ID NO:444), Rv2495c (SEQ ID NO:358), Rv3669 (SEQ ID NO:517), Rv0281 (SEQ ID NO:51), Rv2711 (SEQ ID NO:383), Rv2744c (SEQ ID NO:390), Rv3803c (SEQ ID NO:533), Rv1239c (SEQ ID NO:179), Rv2147c (SEQ ID NO:307), Rv2253 (SEQ ID NO:324), Rv0308 (SEQ ID NO:53), Rv0587 (SEQ ID NO:95), Rv1564c (SEQ ID NO:224), Rv2185c (SEQ ID NO:313), Rv1805c (SEQ ID NO:261),Rv2729c (SEQ ID NO:386), Rv3386 (SEQ ID NO:481), Rv3515c (SEQ ID NO:497), Rv0772 (SEQ ID NO:116), Rv2948c (SEQ ID NO:420), Rv0006 (SEQ ID NO:1), Rv1906c (SEQ ID NO:273), Rv2244 (SEQ ID NO:322), Rv2468c (SEQ ID NO:354), Rv3701c (SEQ ID NO:522), Rv0054 (SEQ ID NO:6), Rv1945 (SEQ ID NO:277), Rv3345c (SEQ ID NO:472), Rv0276 (SEQ ID NO:48), Rv0709 (SEQ ID NO:108), Rv1527c (SEQ ID NO:220), Rv2048c (SEQ ID NO:287), Rv2414c (SEQ ID NO:345), Rv3524 (SEQ ID NO:499), Rv3556c (SEQ ID NO:502), Rv1322 (SEQ ID NO:196), Rv2934 (SEQ ID NO:417), Rv0270 (SEQ ID NO:47), Rv0612 (SEQ ID NO:99), Rv1699 (SEQ ID NO:242), Rv2728c (SEQ ID NO:385), Rv3017c (SEQ ID NO:430), Rv3364c (SEQ ID NO:476), Rv3418c (SEQ ID NO:487), Rv3718c (SEQ ID NO:525), Rv0426c (SEQ ID NO:70), Rv1181 (SEQ ID NO:171), Rv1725c (SEQ ID NO:250), Rv0256c (SEQ ID NO:44), Rv0605 (SEQ ID NO:98), Rv0737 (SEQ ID NO:114), Rv0834c (SEQ ID NO:126), Rv1255c (SEQ ID NO:184), Rv2224c (SEQ ID NO:320), Rv1843c (SEQ ID NO:265), Rv2333c (SEQ ID NO:334), Rv2490c (SEQ ID NO:357), Rv3183 (SEQ ID NO:454), Rv0668 (SEQ ID NO:106), Rv1556 (SEQ ID NO:223), Rv1673c (SEQ ID NO:236), Rv3513c (SEQ ID NO:496), Rv3675 (SEQ ID NO:519), Rv3870 (SEQ ID NO:546), Rv3891c (SEQ ID NO:552), Rv0163 (SEQ ID NO:24), Rv0710 (SEQ ID NO:109), Rv1297 (SEQ ID NO:189), Rv1745c (SEQ ID NO:255), Rv0600c (SEQ ID NO:97), Rv1536 (SEQ ID NO:222), Rv1738 (SEQ ID NO:254), Rv2524c (SEQ ID NO:359), Rv3086 (SEQ ID NO:440), Rv3367 (SEQ ID NO:477), Rv0135c (SEQ ID NO:20), Rv0627 (SEQ ID NO:101), Rv1448c (SEQ ID NO:213), Rv3224a (SEQ ID NO:455), Rv0029 (SEQ ID NO:2), Rv0846c (SEQ ID NO:129), Rv1159 (SEQ ID NO:165), Rv1186c (SEQ ID NO:172), Rv1705c (SEQ ID NO:243), Rv1713 (SEQ ID NO:248), Rv2476c (SEQ ID NO:355), Rv3402c (SEQ ID NO:483), Rv2615c (SEQ ID NO:374), Rv2995c (SEQ ID NO:425), Rv3788 (SEQ ID NO:585), Rv0140 (SEQ ID NO:555), Rv0203 (SEQ ID NO:33), Rv1531 (SEQ ID NO:565), Rv1693 (SEQ ID NO:241), Rv1882c (SEQ ID NO:269), Rv2143 (SEQ ID NO:568), Rv2367c (SEQ ID NO:570), Rv0584 (SEQ ID NO:94), Rv1651c (SEQ ID NO:567), Rv3197a (SEQ ID NO:576), Rv3369 (SEQ ID NO:579), Rv3825c (SEQ ID NO:586), Rv0101 (SEQ ID NO:15), Rv0808 (SEQ ID NO:123), Rv0814c (SEQ ID NO:560), Rv2153c (SEQ ID NO:309), Rv2933 (SEQ ID NO:416), Rv0071 (SEQ ID NO:9), Rv2471 (SEQ ID NO:571), Rv2979c (SEQ ID NO:575), Rv0155 (SEQ ID NO:556), Rv0581 (SEQ ID NO:559), Rv2631 (SEQ ID NO:377), Rv3455c (SEQ ID NO:489), Rv3601c (SEQ ID NO:505), Rv0896 (SEQ ID NO:562), Rv1641 (SEQ ID NO:234), Rv3005c (SEQ ID NO:427), Rv3759c (SEQ ID NO:582), Rv3800c (SEQ ID NO:532), Rv0187 (SEQ ID NO:30), Rv2379c (SEQ ID NO:338), Rv2434c (SEQ ID NO:352), Rv2940c (SEQ ID NO:574), Rv3477 (SEQ ID NO:580), Rv0435c (SEQ ID NO:72), Rv0844c (SEQ ID NO:128), Rv0856 (SEQ ID NO:561), Rv1191 (SEQ ID NO:564), Rv2803 (SEQ ID NO:397), Rv0783c (SEQ ID NO:118), Rv1054 (SEQ ID NO:563), Rv1689 (SEQ ID NO:240), Rv2539c (SEQ ID NO:572), Rv2859c (SEQ ID NO:573), Rv3777 (SEQ ID NO:528), and fragments thereof. Most preferably, the immunodominant antigens are encoded by sequences designated Rv0798c (SEQ ID NO:121); Rv1886c (SEQ ID NO:270); Rv2031c (SEQ ID NO:284); Rv3616c (SEQ ID NO:509); Rv3804c (SEQ ID NO:534); and Rv3874 (SEQ ID NO:547).

[0023] As used herein, the term “immunodominant antigen” refers to an antigen that elicits in at least one stage of the infection production of one or more types of antibodies (e.g., IgG, IgA, IgE, IgM, etc.) in at least 20%, more typically at least 40%, and most typically at least 70% of a population exposed to the antigen, or wherein, when compared to other antigens of the same pathogen, the average binding affinity and/or average quantity of the antibodies produced in the patient in at least one stage of the disease is at least in the upper half, more typically upper tertile, and most typically upper quartile. Most typically, the average binding affinity and/or average quantity of the antibodies is reflected in the signal intensity and signal intensity can therefore be used as a surrogate marker for average binding affinity and/or average quantity of the antibodies. In further aspects, preferred immunodominant antigens are also characterized by a response in the test group that is considered statistically significant when compared with control signal intensity, wherein the significance level p is preferably equal or less than 0.1, more preferably equal or less than 0.05, and most preferably equal or less than 0.01.

[0024] In one aspect of the inventive subject matter, immunodominant antigens are identified from a proteome screen against sera of a population that has been previously exposed to the pathogen. Most preferably, the population is subdivided in several sub-populations to reflect various disease parameters (e.g., active disease, bacillary burden of disease, latent infection, presence of co-infection with HIV, absence of infection, etc.), which can then be correlated with antibody responses to the so identified antigens. It is still further preferred that the screening also provides data on relative reactivities with respect to the antigens and sera of the populations/sub-populations.

[0025] It is generally preferred that at least part of the pathogen's genome is obtained and all potential open reading frames and portions thereof are determined in silico. Once the potential genes are identified, suitable primers are determined to provide amplicons of the entire Open Reading Frames (ORFs),or, less preferably, portions thereof, wherein the primers are preferably designed to allow facile subcloning into an expression system. Most preferably, the subcloning uses recombinase-based subcloning using unpurified PCR mixtures to avoid cloning bias, and the so obtained recombinant plasmids are polyclonally multiplied, which enables unbiased presentation of the amplicons. It is still further particularly preferred that the plasmid preparations are then subjected to an in vitro transcription/translation reaction to thereby provide the recombinant ORF peptide, which is then spotted or otherwise immobilized onto a suitable addressable carrier (e.g., membrane, bead, etc.).

[0026] It should be recognized that the so prepared proteomes can then be exposed to serum of a population of control individuals and/or population of individuals that are known to have current or previous exposure to the above pathogen from which the ORFs were prepared. Antibodies of the serum that bind to one or more of the ORFs are then detected using well known methods (e.g., use of secondary antibodies). In this manner, the entire proteome of the pathogen can be rapidly assessed for immunogenicity and potential binding with antibodies in serum. Various preferred aspects, compositions, and methods of proteome preparation are disclosed in International patent publication number WO 06/088492, which is incorporated by reference herein.

[0027] Therefore, and among various other advantages, it should be especially recognized that contemplated compositions and methods presented herein will allow for preparation of vaccines and diagnostic compositions comprising a plurality of antigens with known and predetermined affinity to target ORFs of a pathogen. As individual immune systems are known to exhibit significant variation with respect to antigen recognition, methods and compositions contemplated herein will allow statistically supported antigen identification to identify immunodominant antigens in a population of patient. Consequently, multiple targets can be used to elicit an immune response and/or detect a prior exposure, even where one or more of the targets may be evasive for detection or provide only a weak response.

[0028] With respect to the immunodominant sequences identified herein, it should be further appreciated that the sequences need not be complete ORFs, but that suitable sequences may also be partial sequences (e.g., synthetic, recombinant or isolated) that typically comprise at least part of an antigenic epitope. For example, contemplated DNA sequences include those that will hybridize under stringent hybridization conditions to respective sequences listed in the sequence listing. Thus, sequences contemplated herein may be identified as DNA sequences encoding the antigenic peptide (partial or entire ORF), or may be identified as peptide sequence (or homologs thereof). Similarly, chemically modified antigens, and/or orthologs of the polypeptides presented herein are also deemed suitable for use herein.

[0029] It should be particularly noted that while proteome screening will provide a plurality of antigens as potentially useful molecules for diagnosis, vaccination, and/or therapy, such an approach only provides a raw cut of (a plurality) of individual responses. Therefore, as most individual immune reactions towards the same pathogen elicit a significantly distinct profile of antibodies (e.g., depending on disease stage, previous exposure, and/or inter-individual variability), results obtained from such screening are typically inhomogeneous. Consequently, variability of the individual immune responses and variability of the quantity of recombinant protein in the array must be taken into consideration to obtain meaningful results.

[0030] Therefore, it should be appreciated that filtering of raw data will result in a collection of antigens with quantified and known relative reactivities with respect to sera of a population infected with the pathogen. Moreover, it should be noted that as signals may be specific to a particular stage in the course of an infection, relative reactivities may be indicative of the time course of the infection, and/or relative reactivities may represent differences in the strength of immunogenicity of the particular antigen (or quantity of deposited antigen in the screening assay). Additionally, it should be particularly recognized that depending on the choice of the specific patient population, the tested sera will reflect the immune status of a population that is characterized by one or more parameters of the disease. For example, populations may be observed that are infected or not infected, that had a long-term exposure or chronic infection, that had spontaneous recovery, that represents a group of responders (or non-responders) to a particular drug treatment, or that had at least partial immunity to the pathogen.

[0031] In still further contemplated aspects, immunodominant antigens are identified by selecting for an antigen (preferably within a well-defined sub-population) that (a) produces in at least 40-50% of a population a measurable signal, and (b) has a signal strength of at least 40% of the overall average signal intensity. However, and more preferably, the signal strength will be at least above average of the overall average signal intensity, and even more preferably in the upper tertile (quartile, or even quintile) of signal intensities in the assay. Therefore, and viewed from another perspective, immunodominant antigens will preferably be selected in a comparison of at least two series of tests, wherein one series of tests is typically the sub-population (e.g., primary infection, active disease, latent infection, recovering, previously diseased, chronic, etc.) and the other series of tests is the control group (e.g., other sub-population or control group). Still further, it is generally preferred that the series of tests also include a negative control against which the potential immunodominant antigens are compared.

[0032] Consequently, and with particular respect to the pathogen presented herein, it should be appreciated that compositions comprising one or more selected immunodominant antigens can be prepared that will have a statistically high probability to elicit or have elicited an immune response in a relatively large group of patients. Further, where the antigens are determined from selected sub-populations (e.g., active disease, severity of disease, latent infection, previously diseased patients, primary infection, etc.), the antigens also have a known association with a disease parameter and thus allow staging of the disease and/or prediction of therapeutic efficacy. Moreover, as the antigens presented herein are immunodominant antigens, it should be noted that vaccine compositions can be prepared with known or predictable immunogenicity.

[0033] More specifically, antigens from M. tuberculosis encoded by the nucleic acids of SEQ ID NO:1 to SEQ ID NO:586 were identified as immunodominant (see examples below). With respect to the reading frame for each of the sequences of SEQ ID NO:1 to SEQ ID NO:586, it should be noted that the first base in the sequences is either the first base of the start codon or the first base in the first codon of the polypeptide that was identified with the methods and compositions provided herein. Most typically, the last three bases denote the stop codon, or the last base of the last codon of the polypeptide that was identified with the methods and compositions provided herein.

[0034] In these examples, each of the antigens was characterized, inter alia, with regard to their individual and relative reactivities for the pathogen. Most typically, reactivity was measured as strength of immunogenicity (e.g., such that average binding affinity and/or average quantity of the antibodies produced a predetermined signal intensity (e.g., in the upper half, upper tertile, or even upper quartile)). Viewed from a different perspective, each one of the identified antigens has a known signal strength (reflecting the quantity of antibodies formed in the patient) in the assay as described below relative to another one of the identified antigens. Some proteins, such as the one depicted in FIG. 5, exhibit a tail distribution of higher intensity signals in TB samples that is not seen in non-TB samples. These two violin plots show the distribution of log10-transformed signal intensities measured for a representative protein in sera from TB cases vs. sera from non-TB disease cases. Proteins having this characteristic distribution were identified on the examples described below by implementing a calculation whereby the null hypothesis could be rejected that the profile of a sample comprised only reactivity values consistent with the non-TB intensity distribution.

[0035] Furthermore, each of the identified antigens was also characterized by association with at least one parameter. In most cases, the disease parameter was active disease after infection, and in further cases, the disease parameter was number of tubercle bacilli in sputum or radiographic extent of disease, and in further cases, history of past disease in the non-diseased population. Therefore, it should be especially appreciated that identification of immunodominant antigens will not only allow for identification of statistically meaningful antigens for diagnosis, vaccine development, and treatment, but also allow to develop a stage specific tool to identify candidate molecules to fine-tune diagnosis and/or treatment.

[0036] For example, suitable diagnostic devices especially include those comprising one or more of the immunodominant antigens, fragments, or analogs thereof that are encoded by nucleic acids according to SEQ ID NO:1 to SEQ ID NO:589, preferably Rv1860 (SEQ ID NO: 588), Rv0934 (SEQ ID NO: 587), Rv1141c (SEQ ID NO: 589), Rv0798c (SEQ ID NO:121), Rv1886c (SEQ ID NO:270), Rv2031c (SEQ ID NO:284), Rv3616c (SEQ ID NO:509), Rv3804c (SEQ ID NO:534), Rv3874 (SEQ ID NO:547), Rv0302 (SEQ ID NO:52), Rv0379 (SEQ ID NO:65),Rv0394c (SEQ ID NO:66), Rv0456c (SEQ ID NO:74), Rv0632c (SEQ ID NO:103), Rv0944 (SEQ ID NO:142), Rv0984(SEQ ID NO:146), Rv1030 (SEQ ID NO:153), Rv1196 (SEQ ID NO:174), Rv1242 (SEQ ID NO:180), Rv1284 (SEQ ID NO:187), Rv1387 (SEQ ID NO:206), Rv1837c (SEQ ID NO:264), Rv1926c (SEQ ID NO:275), Rv1980c (SEQ ID NO:281), Rv2094c (SEQ ID NO:294), Rv2544 (SEQ ID NO:363), Rv2618 (SEQ ID NO:375), Rv2746c (SEQ ID NO:391), Rv2870c (SEQ ID NO:407), Rv2873 (SEQ ID NO:408), Rv2875 (SEQ ID NO:409), Rv3050c (SEQ ID NO:434), Rv3248c (SEQ ID NO:458), Rv3376 (SEQ ID NO:478), Rv3763 (SEQ ID NO:527), Rv3810 (SEQ ID NO:536), Rv3864 (SEQ ID NO:545), Rv2252 (SEQ ID NO:323), Rv2282c (SEQ ID NO:569), Rv0212c (SEQ ID NO:557), Rv3243c (SEQ ID NO:456), Rv3675 (SEQ ID NO:519), Rv2984 (SEQ ID NO:423), Rv1175c (SEQ ID NO:169), Rv3326 (SEQ ID NO:578), Rv3628 (SEQ ID NO:513), Rv3775 (SEQ ID NO:584), Rv3362c (SEQ ID NO:475), Rv0801 (SEQ ID NO:122), Rv1629 (SEQ ID NO:566), Rv0272c (SEQ ID NO:558), Rv3762c (SEQ ID NO:583), Rv3319 (SEQ ID NO:577), Rv3495c (SEQ ID NO:581), Rv2151c (SEQ ID NO:308), Rv0227c(SEQ ID NO:37),Rv0280(SEQ ID NO:50), Rv0993 (SEQ ID NO:148), Rv1306 (SEQ ID NO:192), Rv1363c (SEQ ID NO:204), Rv2050 (SEQ ID NO:288), Rv2116 (SEQ ID NO:299), Rv3417c (SEQ ID NO:486), Rv3653 (SEQ ID NO:516), Rv1253 (SEQ ID NO:182), Rv3413c (SEQ ID NO:485), Rv1635c (SEQ ID NO:232), Rv3021c (SEQ ID NO:432), Rv1193 (SEQ ID NO:173), Rv2592c (SEQ ID NO:369), Rv3620c (SEQ ID NO:510), Rv0929 (SEQ ID NO:139), Rv0959 (SEQ ID NO:145), Rv1162 (SEQ ID NO:166), Rv2389c (SEQ ID NO:341), Rv2984 (SEQ ID NO:423), Rv2588c (SEQ ID NO:367), Rv0171 (SEQ ID NO:26), Rv1865c (SEQ ID NO:267), Rv2074 (SEQ ID NO:290), Rv0543c (SEQ ID NO:87), Rv1677 (SEQ ID NO:237), Rv1304 (SEQ ID NO:191), Rv2841c (SEQ ID NO:400), Rv3680 (SEQ ID NO:520), Rv0831c (SEQ ID NO:125), Rv2032 (SEQ ID NO:285), Rv3127 (SEQ ID NO:446), Rv3272 (SEQ ID NO:464), Rv3323c (SEQ ID NO:470), Rv3508 (SEQ ID NO:494), Rv3628 (SEQ ID NO:513), Rv1173 (SEQ ID NO:167), Rv2623 (SEQ ID NO:376), Rv0527 (SEQ ID NO:85), Rv1620c (SEQ ID NO:229), Rv1901 (SEQ ID NO:272), Rv2151c (SEQ ID NO:308),Rv0362 (SEQ ID NO:60), Rv3129 (SEQ ID NO:447), Rv3140 (SEQ ID NO:449), Rv0340 (SEQ ID NO:56), Rv2792c (SEQ ID NO:395), Rv3003c (SEQ ID NO:426), Rv3019c (SEQ ID NO:431), Rv3862c (SEQ ID NO:544), Rv0572c (SEQ ID NO:91), Rv2477c (SEQ ID NO:356), Rv2659c (SEQ ID NO:379), Rv0311 (SEQ ID NO:54), Rv0350 (SEQ ID NO:57), Rv2127 (SEQ ID NO:301), Rv3875 (SEQ ID NO:548), Rv0877 (SEQ ID NO:134), Rv1916 (SEQ ID NO:274), Rv2138 (SEQ ID NO:303), Rv2847c (SEQ ID NO:403), Rv3118 (SEQ ID NO:444), Rv2495c (SEQ ID NO:358), Rv3669 (SEQ ID NO:517), Rv0281 (SEQ ID NO:51), Rv2711 (SEQ ID NO:383), Rv2744c (SEQ ID NO:390), Rv3803c (SEQ ID NO:533), Rv1239c (SEQ ID NO:179), Rv2147c (SEQ ID NO:307), Rv2253 (SEQ ID NO:324), Rv0308 (SEQ ID NO:53), Rv0587 (SEQ ID NO:95), Rv1564c (SEQ ID NO:224), Rv2185c (SEQ ID NO:313), Rv1805c (SEQ ID NO:261),Rv2729c (SEQ ID NO:386), Rv3386 (SEQ ID NO:481), Rv3515c (SEQ ID NO:497), Rv0772 (SEQ ID NO:116), Rv2948c (SEQ ID NO:420), Rv0006 (SEQ ID NO:1), Rv1906c (SEQ ID NO:273), Rv2244 (SEQ ID NO:322), Rv2468c (SEQ ID NO:354), Rv3701c (SEQ ID NO:522), Rv0054 (SEQ ID NO:6), Rv1945 (SEQ ID NO:277), Rv3345c (SEQ ID NO:472), Rv0276 (SEQ ID NO:48), Rv0709 (SEQ ID NO:108), Rv1527c (SEQ ID NO:220), Rv2048c (SEQ ID NO:287), Rv2414c (SEQ ID NO:345), Rv3524 (SEQ ID NO:499), Rv3556c (SEQ ID NO:502), Rv1322 (SEQ ID NO:196), Rv2934 (SEQ ID NO:417), Rv0270 (SEQ ID NO:47), Rv0612 (SEQ ID NO:99), Rv1699 (SEQ ID NO:242), Rv2728c (SEQ ID NO:385), Rv3017c (SEQ ID NO:430), Rv3364c (SEQ ID NO:476), Rv3418c (SEQ ID NO:487), Rv3718c (SEQ ID NO:525), Rv0426c (SEQ ID NO:70), Rv1181 (SEQ ID NO:171), Rv1725c (SEQ ID NO:250), Rv0256c (SEQ ID NO:44), Rv0605 (SEQ ID NO:98), Rv0737 (SEQ ID NO:114), Rv0834c (SEQ ID NO:126), Rv1255c (SEQ ID NO:184), Rv2224c (SEQ ID NO:320), Rv1843c (SEQ ID NO:265), Rv2333c (SEQ ID NO:334), Rv2490c (SEQ ID NO:357), Rv3183 (SEQ ID NO:454), Rv0668 (SEQ ID NO:106), Rv1556 (SEQ ID NO:223), Rv1673c (SEQ ID NO:236), Rv3513c (SEQ ID NO:496), Rv3675 (SEQ ID NO:519), Rv3870 (SEQ ID NO:546), Rv3891c (SEQ ID NO:552), Rv0163 (SEQ ID NO:24), Rv0710 (SEQ ID NO:109), Rv1297 (SEQ ID NO:189), Rv1745c (SEQ ID NO:255), Rv0600c (SEQ ID NO:97), Rv1536 (SEQ ID NO:222), Rv1738 (SEQ ID NO:254), Rv2524c (SEQ ID NO:359), Rv3086 (SEQ ID NO:440), Rv3367 (SEQ ID NO:477), Rv0135c (SEQ ID NO:20), Rv0627 (SEQ ID NO:101), Rv1448c (SEQ ID NO:213), Rv3224a (SEQ ID NO:455), Rv0029 (SEQ ID NO:2), Rv0846c (SEQ ID NO:129), Rv1159 (SEQ ID NO:165), Rv1186c (SEQ ID NO:172), Rv1705c (SEQ ID NO:243), Rv1713 (SEQ ID NO:248), Rv2476c (SEQ ID NO:355), Rv3402c (SEQ ID NO:483), Rv2615c (SEQ ID NO:374), Rv2995c (SEQ ID NO:425), Rv3788 (SEQ ID NO:585), Rv0140 (SEQ ID NO:555), Rv0203 (SEQ ID NO:33), Rv1531 (SEQ ID NO:565), Rv1693 (SEQ ID NO:241), Rv1882c (SEQ ID NO:269), Rv2143 (SEQ ID NO:568), Rv2367c (SEQ ID NO:570), Rv0584 (SEQ ID NO:94), Rv1651c (SEQ ID NO:567), Rv3197a (SEQ ID NO:576), Rv3369 (SEQ ID NO:579), Rv3825c (SEQ ID NO:586), Rv0101 (SEQ ID NO:15), Rv0808 (SEQ ID NO:123), Rv0814c (SEQ ID NO:560), Rv2153c (SEQ ID NO:309), Rv2933 (SEQ ID NO:416), Rv0071 (SEQ ID NO:9), Rv2471 (SEQ ID NO:571), Rv2979c (SEQ ID NO:575), Rv0155 (SEQ ID NO:556), Rv0581 (SEQ ID NO:559), Rv2631 (SEQ ID NO:377), Rv3455c (SEQ ID NO:489), Rv3601c (SEQ ID NO:505), Rv0896 (SEQ ID NO:562), Rv1641 (SEQ ID NO:234), Rv3005c (SEQ ID NO:427), Rv3759c (SEQ ID NO:582), Rv3800c (SEQ ID NO:532), Rv0187 (SEQ ID NO:30), Rv2379c (SEQ ID NO:338), Rv2434c (SEQ ID NO:352), Rv2940c (SEQ ID NO:574), Rv3477 (SEQ ID NO:580), Rv0435c (SEQ ID NO:72), Rv0844c (SEQ ID NO:128), Rv0856 (SEQ ID NO:561), Rv1191 (SEQ ID NO:564), Rv2803 (SEQ ID NO:397), Rv0783c (SEQ ID NO:118), Rv1054 (SEQ ID NO:563), Rv1689 (SEQ ID NO:240), Rv2539c (SEQ ID NO:572), Rv2859c (SEQ ID NO:573), Rv3777 (SEQ ID NO:528).

[0037] Depending on the particular device format, the device may have only a single immunodominant antigen, fragment, or analog that may be used for detection of binding of antibodies from blood, plasma or serum or other bodily fluids containing antibody in an automated manner or by visual observation. For example, where a single immunodominant antigen is employed, suitable devices may be in the format of a dipstick or competitive ELISA. On the other hand, where multiple immunodominant antigens are employed, suitable devices may be in the format of an array that can be read in an automated device (e.g., via scanner) or visual manner (e.g., dye-forming colorimetric reaction). Most typically, in such devices, the plurality of antigens is deposited in a spatially addressable manner (e.g., x-y matrix or beads with color association or microtiter plate). Moreover, it should be noted that diagnostic devices contemplated herein may be based on numerous well known manners of detection, including ELISA (sandwich or non-sandwich), competitive ELISA, anti-idiotypic antibodies, etc., wherein all known colorimetric and photometric (e.g., fluorescence, luminescence, etc.) or radiometric reactions are deemed suitable for use.

[0038] In most typical devices, a plurality of immunodominant antigens of a single (or multiple) pathogen and/or serotype are deposited on a solid surface or onto an addressable solid phase and exposed to blood, serum, plasma or other antibody-containing body fluid. Consequently, so prepared compositions can be employed to identify and/or characterize an immune response of an individual against selected antigens, and optionally assess the kind of immune response (e.g., identification of latent or chronic infection), as well as disease progression, efficacy of therapy, etc. Most typically, the plurality of antigens will include between 5 to 10 antigens, but significantly higher amounts of antigens are also contemplated, including at least 25%, more typically at least 50%, even more typically at least 75%, and most typically at least 90% of the proteome of the pathogen. Similarly, less than 5 antigens (1-4) are also deemed suitable. In further typical aspects of the inventive subject matter, contemplated arrays are most preferably processed in a microfluidic device. For example, an array of antigens in such devices may be printed on a membrane or other material (e.g., nitrocellulose-coated carrier of less than 1 cm2 area) that is then placed in a microfluidic device having sample/reagent inlet and outlet ports. Depending on the specific configuration, signals may be acquired using optical methods (e.g., CCD chip, flat bed scanner, etc.), electrical methods (e.g., voltametric or amperometric), or other methods well known in the art. Alternatively, visual detection or detection using a regular flat bed scanner at 1200 dpi resolution and/or fluorescence detection is also deemed suitable.

[0039] In another example, immunodominant antigens according to the inventive subject matter may also be employed to generate an antibody preparation that can be used as passive vaccination for therapeutic treatment of tuberculosis. In preferred embodiments, such vaccines are subunit vaccines or attenuated live recombinant vaccines. For example, the immunodominant antigens presented herein may be employed in the manufacture of a vaccine that comprises at least one, and more typically at least two of the immunodominant antigens encoded by nucleic acids according to SEQ ID NO:1 to SEQ ID NO:586. More preferably, however, contemplated vaccines will include between two and five, or at least six, and even more antigens, of which at least one of the antigens is an immunodominant antigen. Such vaccine compositions may be directed to elicit immunity against single or multiple subtypes and may thus comprise distinct immunodominant antigens, optionally from multiple and distinct subtypes. Moreover, it should be appreciated that vaccines may be produced that predominantly, or even exclusively, comprise immunodominant antigens of a single parameter. For example, a vaccine may comprise immunodominant antigens that are characteristic for a population that has a latent infection. In less preferred aspects, the sequences according to SEQ ID NO:1 to SEQ ID NO:586 may also be employed as DNA vaccines, or be part of an in vivo expression system that triggers an immune response against the in vivo produced recombinant antigen or fragment thereof

[0040] Additionally, it is contemplated that antigens identified herein may also be employed to generate (monoclonal or polyclonal) antibodies or fragments thereof (e.g., Fab, scFv, etc.) that can then be employed in a diagnostic test that directly detects the presence of the antigen in blood, blood derivatives or other body fluid of a patient where the antigen is circulating in the patient. Of course, it should be appreciated that the antigen may circulate in association with the pathogen, in association with components of the pathogen, in free form, or bound to a molecule or cell of the patient. Most preferably, the antigens are immunodominant and/or serodiagnostic antigens as presented herein. For example, suitable tests include those in which one or more labeled antibodies are used to detect presence of the antigen in bodily fluid where the antigen may be captured (specifically or in bulk with other proteins) on a surface. There are numerous antigen detection methods known in the art and all of the known formats are deemed suitable for use herein.

[0041] In certain embodiments, the diagnostic tools of the present invention involve the recognition of the immunodominant antigens described herein in an in vitro cellular assay determining the release of cytokines, such as interferon gamma, from lymphocytes withdrawn from a subject currently or previously infected with a virulent mycobacterium.

[0042] With respect to suitable formulations of vaccines, it should be recognized that all known manners of producing such vaccines are deemed appropriate for use herein, and a person of ordinary skill in the art will be readily able to produce such vaccines without undue experimentation (see e.g., “Vaccine Adjuvants and Delivery Systems” by Manmohan Singh; Wiley-Interscience (Jun. 29, 2007), ISBN: 0471739073; or “Vaccine Protocols” (Methods in Molecular Medicine) by Andrew Robinson, Martin P. Cranage, and Michael J. Hudson; Humana Press; 2 edition (Aug. 27, 2003); ISBN: 1588291405). Therefore, suitable vaccines may be formulated as injectable solutions, or suspensions, intranasal formulations, transdermal or oral formulations.

[0043] The compositions, vaccines, diagnostic tests, etc., described herein may be used for both human and veterinary use.

### EXAMPLES

[0044] M. tuberculosis proteome microarray chip fabrication and probing methods: Proteome microarrays were fabricated as described previously (Proc Natl Acad Sci USA 102(3): 547-552; Proteomics 7(10): 1678-1686; Proteomics 7(13): 2172-2183) with modifications. This and all other extrinsic materials discussed herein are incorporated by reference in their entirety. Where a definition or use of a term in an incorporated reference is inconsistent or contrary to the definition of that term provided herein, the definition of that term provided herein applies and the definition of that term in the reference does not apply.

[0045] High-throughput construction of the M. tuberculosis ORFeome: Using the available M. tuberculosis sequence data primer pairs were designed for all ORFs encoded in the genome. Quality control was performed using gel electrophoresis of PCR products. After three rounds of PCR, the final tally was 97.3% successfully amplified. For cloning, PCR products were mixed with a linearized pXT7-based expression vector as described previously and transformed into supercompetent DH5a cells. The transformed cells were cultured at 37° C. with vigorous aeration and were checked for turbidity the following day. DNA was purified from the overnight cultures without prior colony selection using QIAprep 96 Turbo Miniprep Kits from Qiagen. Of the 3998 successfully amplified PCR products, 3858 were cloned into the pXi vector (96.5% efficiency). A random sample of 1064 clones were tested by ‘QC-PCR’ in which using the sequence-specific primers were again used to verify that the cloned inserts were the expected size. Of these, 1007 were verified (94.6%) using this methodology.

[0046] More specifically, 4109 primer pairs were designed to amplify every ORF in the M. tuberculosis (strain H37Rv) genome annotated in Tuberculist (http://genolist.pasteur.fr/TubercuList/). Custom PCR primers comprising 20 bp of gene-specific sequence with 33 bp of “adapter” sequences were used in PCRs with genomic DNA as template. For genes >3 kb, additional primer pairs were designed to amplify overlapping fragments of 3 kb each. All primer pairs used for this work are published at the UCI Institute for Genomics and Bioinformatics (IGB) web portal at http://contact14.ics.uci.edu/virus/tuber_index.php. The adapter sequences, which become incorporated into the termini flanking the amplified gene, are homologous to the cloning site of the linearized T7 expression vector pXT7 and allow the PCR products to be cloned by in vivo homologous recombination in competent DH5a cells. The resulting protein incorporates an ATG translation start codon, a 5′ polyhistidine epitope, a 3′ influenza hemagglutinin epitope and a T7 terminator.

[0047] Array fabrication: Antibodies against the N-terminal poly-His and the C-terminal HA tags engineered into each protein were used to monitor the expression in each spot. Positive and negative controls were built into every array and remaining spots on the array were in vitro transcription/translation reactions expressing 4109 different M. tuberculosis clones representing the entire cloned ORFeome. Once RTS reactions were printed onto nitrocellulose and dried, no appreciable degradation was observed after 6 months of storage in a desiccator at 18° C. (data not shown). However, a reduction in signal and a reduced signal-to-noise ratio associated with prolonged delay in printing after the end of the 5 h in vitro protein expression was observed. To minimize such reduction, in vitro expression reactions were staggered through the print run. Thus, it is generally preferred that the reactions are no more than 5, more preferably no more than 3, and most preferably no more than 1 hour old before printing. Remaining variance in signals was normalized using positive and negative controls as described below.

[0048] Microarray chips were fabricated in batches of 50-100 2-pad slides (i.e., 100-200 arrays). Two standard deviations above the average of the negative control intensity was used as a cut-off for detection of the tags. Overall, 3854 (96.4%) of the expressed proteins were positive for the HIS tag, 3730 (93.3%) were positive for the HA tag, 3538 (91%) were positive for both tags, and only 56 (1.4%) were negative for both tags, which means 98.6% of the expressed proteins were positive for at least 1 of the tags.

[0049] In more detail, purified minipreps of DNA of 4109 clones (3998 full length ORFs plus 111 segments of ORFs>3 kb) were expressed in the E. coli based in vitro transcription/translation expression system from Roche (RTS-100). 10 μl in vitro reactions were set up in sealed 384 well plates and incubated for 5 h at 30° C. in a platform microshaker at 300 RPM. A mixture of Tween-20 to a final concentration of 0.05% and a protease inhibitor cocktail (Cømplete, Roche) were then added. To minimize delay in printing after completion of protein expression, the initiation of the RTS reactions was staggered. The RTS reactions were printed in singlicate without further purification onto 2-pad nitrocellulose-coated FAST slides (Whatman) using an Omni Grid 100 microarray printer (Genomic Solutions) in 4×4 sub-array format, with each subarray comprising 17×17 spots. Each sub-array included 6 negative control spots comprising ‘mock’ RTS reactions lacking DNA template. Each sub-array also included positive control spots of 5 serial dilutions of mouse, rat and human whole IgG. Together these positive and negative controls are used to normalize the data from different arrays (infra) Also included were 4 serial dilutions of purified recombinant Epstein-Barr virus nuclear antigen-1 (EBNA-1) which is recognized by the majority of humans and which serves as a useful guide to serum quality. Also printed were three recombinant M. tuberculosis proteins, 38 KDa (Rv0934), CFP-10 (Rv3874 (SEQ ID NO:547)), and ESAT-6 (Rv3875 (SEQ ID NO:548)). In addition, 6 serial dilutions of recombinant vascular endothelial growth factor (VEGF) from Invitrogen (Carlsbad Calif.) and tumor necrosis factor-α (TNF-α) were printed to be used as a hybridization controls by ‘spiking-in’ monoclonal anti-VEGF and anti-TNF-α antibodies into certain sera samples.

[0050] For probing with sera, the sera were diluted to 1/200 in Low Cross Dilution Buffer (Candor Bioscience) containing E. coli lysate at a final concentration of 4-5 mg/ml protein, and incubated at room temperature for 30 minutes with constant mixing to block anti-E. coli antibodies. The arrays were rehydrated in blocking buffer (Candor Bioscience) for 30 min and probed with the pretreated sera overnight at 4° C. with constant agitation. The slides were then washed 5× in tris(hydroxymethyl)aminomethane (Tris)-buffered saline containing 0.05% (v/v) Tween 20, (T-TBS) and incubated in biotinylated anti-human IgG-Fc (Jackson Immuno Research) diluted 1/400 in dilution buffer. After washing the slides three times each in T-TBS, bound antibodies were visualized by incubation with streptavidin-conjugated SureLight® P-3 (Columbia Biosciences). The slides were then washed three times each in T-TBS followed by TBS, and dipped in distilled water prior to air drying by brief centrifugation. Protein expression was monitored on the printed array by probing with monoclonal anti-polyhistidine (clone His-1, Sigma) and anti-hemagglutinin (clone 3F10, Roche) using biotinylated anti-mouse and anti-rat secondary antibodies, respectively followed by streptavidin-conjugated SureLight® P-3.

[0051] Human sera: Sera were obtained from 927 patients enrolled from clinical sites in several TB-endemic areas of the world using a cohort design that included individuals presenting with respiratory symptoms suggestive of TB (TB suspects). Diagnosis of active TB was made on the basis of evidence of growth of M. tuberculosis from sputum of patients (culture-confirmed active TB) (n=403). Diagnosis of non-TB disease was made on the basis of full microbiological and chest X ray (CXR) investigations (n =418). Non-TB disease cases included were those not treated empirically for TB and who received adequate follow-up by symptom screen, and CXR at times, to exclude TB. BCG vaccination status was not always known, but cohorts were all from countries that implement universal BCG vaccination at birth. For data analysis, active TB cases were subdivided in smear positive TB (presence of M. tuberculosis in sputum) and smear negative active TB. Cases in the TB and non-TB disease group were also subdivided based on HIV comorbidity. Negative control sera (n=42) were obtained from healthy, asymptomatic individuals from a non-endemic country (Italy) who were confirmed latent TB infection (LTBI)-negative by tuberculin skin test, Quantiferon assay and tuberculosis ELISPOT (T-spot) assay. The BCG vaccination status of this latter set of donors is not known, but generally, individuals from endemic countries are vaccinated and those from non-endemic countries are not.

[0052] Data acquisition: Slides were scanned using a GenePix Autoloader 4200AL microarray confocal laser scanner (Molecular Devices) Median pixel intensity of the spots were quantified from tiff image files of probed array scans using GenePix Pro 6.0 software (Molecular Devices).

[0053] Classification of immunoreactive antigens by proteomic features and function: Antigens were classified according to the Functional Classification Codes annotated on TubercuList, Computational predictions were also made using SignalP (J Mol Biol 340(4): 783-795) and PSORTb (Bioinformatics 21(5): 617-623) (http://db.psort.org) to predict the presence probability of signal peptides and cellular localization, respectively.

[0054] Screening the proteome for serodiagnostic antigens: Representative arrays probed with serum from each group are shown in FIGS. 1A and 1B. Here, panel (A) shows culture-confirmed TB-positive individual, and panel (B) shows latent TB infected-negative control individual. Each array contained positive and negative control spots. The IgG control spots, which control for secondary antibody, were positive in both arrays. Neither individuals reacted with the negative (‘no DNA’) control reactions. Both groups of individuals reacted to EBNA-1, indicating prior exposure to EBV, and the group of acute infected individuals, had a robust antibody response to several M. tuberculosis antigens.

[0055] One evaluation of the array was performed by calculating a cut-off value above the mean +2 SD of the control (‘no DNA’) signals. By this criterion it was noted that sera from both TB-positive and control individuals reacted to antigens on the array. Even by visual estimation, however, it was evident that TB-confirmed patients reacted more intensely and against more antigens than the controls. To determine whether the signals seen for M. tuberculosis antigens were E. coli-specific antibodies against which blocking had failed, E. coli lysate concentration was increased. However, this had no effect on these signals (data not shown). Lysate prepared from M. tuberculosis was also included with the result that this completely abolished all signals on the array (data not shown), which indicates that the signals seen on the array are due to M. tuberculosis-specific antibodies in the sera.

[0056] Protein Microarray Data Analysis:

[0057] Microarray data were analyzed by four methods, summarized below. Log10-transformed data were used for first three methods and VSN-normalized data were used for the fourth method. FIG. 4A shows proteins ranking <10 in at least one of three analytical methods (random forests, CERNO, and random forests with CERNO-prefiltered data) in a comparison between TB cases (n=400) and non-TB disease cases (n=418). Relative ranks of proteins (max rank ˜4000) in each method are shown. N/A, not available; this implies that the protein was pre-filtered by CERNO (p value for filtration >0.005). FIG. 4B shows the same as FIG. 4A, but for a comparison between TB cases (n=255) and non-TB disease cases (n=307) among HIV negative persons only.

[0058] 1. TB and non-TB samples were classified by Random Forests, a classification method based on multiple classification trees. Random forests queries (comparisons of TB to non-TB disease classes) were performed with data collected from sera from endemic countries, and with data stratified for HIV status and for smear status of TB patients. Antigens were ranked from most informative to least informative based on mean decrease accuracy output of a particular query (highest mean decrease accuracy corresponds to highest rank). The random forests analysis was conducted with and without a pre-filtering step using the CERNO statistical calculation.

[0059] 2. CERNO p-values provide an association of high relative intensities with active tuberculosis diagnosis. Antigens were ranked by decreasing p-value.

[0060] 3. The data were also analyzed to identify antigens that exhibit unusually high binding in TB samples relative to the non-TB disease samples by the following, sequential calculations: (i) the mean and variance for each antigen in non-TB from endemic areas; (ii) a Z score (number of standard deviations from the mean for an antigen in the non-TB disease class) for each antigen in each sample in one comparison (TB vs non-TB disease from endemic countries); (iii) a p-value corresponding to the Z score (expected normal distribution tail area above the value); (iv) the adjusted p-values (Benjamini-Hochberg) for each profile; (v) reactivity vs no reactivity at the p-adjusted level of 0.01 (false discovery rate of one percent). Antigens were ranked by number of reactivity calls in the TB group.

[0061] 4. To stabilize variance of the raw data, a variant of the log-transformation (asinh) was used (Bioinformatics 20(5): 660-667), and negative and positive control spots (the ‘no DNA’ and IgG spots, respectively) were used to normalize the data using the “VSN” package in R from the Bioconductor suite (http://Bioconductor.org/). A p-value on the normalized data was prepared by comparing signals between the confirmed TB-positive and LTBI-negative control groups using a Bayes-regularized t-test adapted from Cyber-T for use with protein arrays (Bioinformatics 17(6): 509-519; J Biol Chem 276(23): 19937-19944; Bioinformatics 22(14): 1760-1766; Bioinformatics 23(13): i508-518). To account for multiple test conditions, Benjamini Hochberg p-value adjustments were calculated. Reactive antigens were defined as serodiagnostic or cross-reactive by having a Benjamini Hochberg corrected p-value <0.05 or >0.05, respectively, and an average signal intensity >2 std. dev above the mean of the negative control (no DNA) spots on the smear positive samples. Multiple antigen classifiers were built using Support Vector Machines (SVMs). The “e1071” and “ROCR” packages in R were utilized to train the SVMs and to produce receiver operating characteristic (ROC) curves, respectively. For other graphic representations such as heat maps and histograms, normalized data were retransformed into approximate raw values.

[0062] With the methods above, a total of 250 antigens were selected by combining top 50 ranks from Random Forests (RF) and CERNO for queries on all TB and non-TB disease patients, all HIV negative TB and non-TB disease patients (with and without stratification by smear), plus top 10 ranks for HIV-positive TB and non-TB disease query, plus reactivity calls of >3 in TB category, plus Benjamini Hochberg adjusted Cyber T p value <0.05. Seven sets of antigens were prioritized based on agreement by the methods, with the antigens of the first set being the most preferred.

[0063] The most preferred sequences encoding the antigens were characterized by RF or CERNO (p<0.005) plus reactivity calls, RF (<10) and CERNO (p<0.005), and Benjamini Hochberg adjusted Cyber T p value <0.05: Rv0798c (SEQ ID NO: 121), Rv1886c (SEQ ID NO:270), Rv2031c (SEQ ID NO:284), Rv3616c (SEQ ID NO:509), Rv3804c (SEQ ID NO:534), Rv3874 (SEQ ID NO:547).

[0064] The following sequences producing the antigens were determined to be second most preferential, characterized by RF or CERNO (p<0.005) plus reactivity calls, RF (<10) and CERNO (p<0.005): Rv0302 (SEQ ID NO:52), Rv0379 (SEQ ID NO:65),Rv0394c (SEQ ID NO:66), Rv0456c (SEQ ID NO:74), Rv0632c (SEQ ID NO:103), Rv0944 (SEQ ID NO:142), Rv0984 (SEQ ID NO:146), Rv1030 (SEQ ID NO:153), Rv1196 (SEQ ID NO:174), Rv1242 (SEQ ID NO:180), Rv1284 (SEQ ID NO:187), Rv1387 (SEQ ID NO:206), Rv1837c (SEQ ID NO:264), Rv1926c (SEQ ID NO:275), Rv1980c (SEQ ID NO:281), Rv2094c (SEQ ID NO:294), Rv2544 (SEQ ID NO:363), Rv2618 (SEQ ID NO:375), Rv2746c (SEQ ID NO:391), Rv2870c (SEQ ID NO:407), Rv2873 (SEQ ID NO:408), Rv2875 (SEQ ID NO:409), Rv3050c (SEQ ID NO:434), Rv3248c (SEQ ID NO:458), Rv3376 (SEQ ID NO:478), Rv3763 (SEQ ID NO:527), Rv3810 (SEQ ID NO:536), Rv3864 (SEQ ID NO:545).

[0065] The following sequences producing the antigens were determined to be third most preferential, characterized by Benjamini Hochberg adjusted Cyber T p value <0.05: Rv2252 (SEQ ID NO:323), Rv2282c (SEQ ID NO:569), Rv0212c (SEQ ID NO:557), Rv3243c (SEQ ID NO:456), Rv3675 (SEQ ID NO:519), Rv2984 (SEQ ID NO:423), Rv1175c (SEQ ID NO:169), Rv3326 (SEQ ID NO:578), Rv3628 (SEQ ID NO:513), Rv3775 (SEQ ID NO:584), Rv3362c (SEQ ID NO:475), Rv0801 (SEQ ID NO:122), Rv1629 (SEQ ID NO:566), Rv0272c (SEQ ID NO:558), Rv3762c (SEQ ID NO:583), Rv3319 (SEQ ID NO:577), Rv3495c (SEQ ID NO:581), Rv2151c (SEQ ID NO:308).

[0066] The following sequences producing the antigens were determined to be fourth most preferential, characterized by reactivity calls: Rv0227c(SEQ ID NO:37), Rv0280(SEQ ID NO:50), Rv0993 (SEQ ID NO:148), Rv1306 (SEQ ID NO:192), Rv1363c (SEQ ID NO:204), Rv2050 (SEQ ID NO:288), Rv2116 (SEQ ID NO:299), Rv3417c (SEQ ID NO:486), Rv3653 (SEQ ID NO:516).

[0067] The following sequences producing the antigens were determined to be fifth most preferential, characterized by ranks <10 by either CERNO or RF: Rv1253 (SEQ ID NO:182), Rv3413c (SEQ ID NO:485), Rv1635c (SEQ ID NO:232), Rv3021c (SEQ ID NO:432), Rv1193 (SEQ ID NO:173), Rv2592c (SEQ ID NO:369), Rv3620c (SEQ ID NO:510), Rv0929 (SEQ ID NO:139), Rv0959 (SEQ ID NO:145), Rv1162 (SEQ ID NO:166), Rv2389c (SEQ ID NO:341), Rv2984 (SEQ ID NO:423), Rv2588c (SEQ ID NO:367), Rv0171 (SEQ ID NO:26), Rv1865c (SEQ ID NO:267), Rv2074 (SEQ ID NO:290).

[0068] The following sequences producing the antigens were determined to be sixth most preferential, characterized by ranks <25 by either CERNO or RF: Rv0543c (SEQ ID NO:87), Rv1677 (SEQ ID NO:237), Rv1304 (SEQ ID NO:191), Rv2841c (SEQ ID NO:400), Rv3680 (SEQ ID NO:520), Rv0831c (SEQ ID NO:125), Rv2032 (SEQ ID NO:285), Rv3127 (SEQ ID NO:446), Rv3272 (SEQ ID NO:464), Rv3323c (SEQ ID NO:470), Rv3508 (SEQ ID NO:494), Rv3628 (SEQ ID NO:513), Rv1173 (SEQ ID NO:167), Rv2623 (SEQ ID NO:376), Rv0527 (SEQ ID NO:85), Rv1620c (SEQ ID NO:229), Rv1901 (SEQ ID NO:272), Rv2151c (SEQ ID NO:308),Rv0362 (SEQ ID NO:60), Rv3129 (SEQ ID NO:447), Rv3140 (SEQ ID NO:449), Rv0340 (SEQ ID NO:56), Rv2792c (SEQ ID NO:395), Rv3003c (SEQ ID NO:426), Rv3019c (SEQ ID NO:431), Rv3862c (SEQ ID NO:544), Rv0572c (SEQ ID NO:91), Rv2477c (SEQ ID NO:356), Rv2659c (SEQ ID NO:379), Rv0311 (SEQ ID NO:54), Rv0350 (SEQ ID NO:57), Rv2127 (SEQ ID NO:301), Rv3875 (SEQ ID NO:548), Rv0877 (SEQ ID NO:134), Rv1916 (SEQ ID NO:274), Rv2138 (SEQ ID NO:303), Rv2847c (SEQ ID NO:403), Rv3118 (SEQ ID NO:444), Rv2495c (SEQ ID NO:358), Rv3669 (SEQ ID NO:517), Rv0281 (SEQ ID NO:51), Rv2711 (SEQ ID NO:383), Rv2744c (SEQ ID NO:390), Rv3803c (SEQ ID NO:533), Rv1239c (SEQ ID NO:179), Rv2147c (SEQ ID NO:307), Rv2253 (SEQ ID NO:324), Rv0308 (SEQ ID NO:53), Rv0587 (SEQ ID NO:95), Rv1564c (SEQ ID NO:224), Rv2185c (SEQ ID NO:313).

[0069] The following sequences producing the antigens were determined to be seventh most preferential, characterized by ranks between 26 and 50 by either CERNO or RF: Rv1805c (SEQ ID NO:261),Rv2729c (SEQ ID NO:386), Rv3386 (SEQ ID NO:481), Rv3515c (SEQ ID NO:497), Rv0772 (SEQ ID NO:116), Rv2948c (SEQ ID NO:420), Rv0006 (SEQ ID NO:1), Rv1906c (SEQ ID NO:273), Rv2244 (SEQ ID NO:322), Rv2468c (SEQ ID NO:354), Rv3701c (SEQ ID NO:522), Rv0054 (SEQ ID NO:6), Rv1945 (SEQ ID NO:277), Rv3345c (SEQ ID NO:472), Rv0276 (SEQ ID NO:48), Rv0709 (SEQ ID NO:108), Rv1527c (SEQ ID NO:220), Rv2048c (SEQ ID NO:287), Rv2414c (SEQ ID NO:345), Rv3524 (SEQ ID NO:499), Rv3556c (SEQ ID NO:502), Rv1322 (SEQ ID NO:196), Rv2934 (SEQ ID NO:417), Rv0270 (SEQ ID NO:47), Rv0612 (SEQ ID NO:99), Rv1699 (SEQ ID NO:242), Rv2728c (SEQ ID NO:385), Rv3017c (SEQ ID NO:430), Rv3364c (SEQ ID NO:476), Rv3418c (SEQ ID NO:487), Rv3718c (SEQ ID NO:525), Rv0426c (SEQ ID NO:70), Rv1181 (SEQ ID NO:171), Rv1725c (SEQ ID NO:250), Rv0256c (SEQ ID NO:44), Rv0605 (SEQ ID NO:98), Rv0737 (SEQ ID NO:114), Rv0834c (SEQ ID NO:126), Rv1255c (SEQ ID NO:184), Rv2224c (SEQ ID NO:320), Rv1843c (SEQ ID NO:265), Rv2333c (SEQ ID NO:334), Rv2490c (SEQ ID NO:357), Rv3183 (SEQ ID NO:454), Rv0668 (SEQ ID NO:106), Rv1556 (SEQ ID NO:223), Rv1673c (SEQ ID NO:236), Rv3513c (SEQ ID NO:496), Rv3675 (SEQ ID NO:519), Rv3870 (SEQ ID NO:546), Rv3891c (SEQ ID NO:552), Rv0163 (SEQ ID NO:24), Rv0710 (SEQ ID NO:109), Rv1297 (SEQ ID NO:189), Rv1745c (SEQ ID NO:255), Rv0600c (SEQ ID NO:97), Rv1536 (SEQ ID NO:222), Rv1738 (SEQ ID NO:254), Rv2524c (SEQ ID NO:359), Rv3086 (SEQ ID NO:440), Rv3367 (SEQ ID NO:477), 1670135c (SEQ ID NO:20), Rv0627 (SEQ ID NO:101), Rv1448c (SEQ ID NO:213), Rv3224a (SEQ ID NO:455), Rv0029 (SEQ ID NO:2), 1670846c (SEQ ID NO:129), Rv1159 (SEQ ID NO:165), Rv1186c (SEQ ID NO:172), Rv1705c (SEQ ID NO:243), Rv1713 (SEQ ID NO:248), Rv2476c (SEQ ID NO:355), Rv3402c (SEQ ID NO:483), Rv2615c (SEQ ID NO:374), Rv2995c (SEQ ID NO:425), Rv3788 (SEQ ID NO:585), Rv0140 (SEQ ID NO:555), Rv0203 (SEQ ID NO:33), Rv1531 (SEQ ID NO:565), Rv1693 (SEQ ID NO:241), Rv1882c (SEQ ID NO:269), Rv2143 (SEQ ID NO:568), Rv2367c (SEQ ID NO:570), Rv0584 (SEQ ID NO:94), Rv1651c (SEQ ID NO:567), Rv3197a (SEQ ID NO:576), Rv3369 (SEQ ID NO:579), Rv3825c (SEQ ID NO:586), Rv0101 (SEQ ID NO:15), Rv0808 (SEQ ID NO:123), Rv0814c (SEQ ID NO:560), Rv2153c (SEQ ID NO:309), Rv2933 (SEQ ID NO:416), Rv0071 (SEQ ID NO:9), Rv2471 (SEQ ID NO:571), Rv2979c (SEQ ID NO:575), Rv0155 (SEQ ID NO:556), Rv0581 (SEQ ID NO:559), Rv2631 (SEQ ID NO:377), Rv3455c (SEQ ID NO:489), Rv3601c (SEQ ID NO:505), Rv0896 (SEQ ID NO:562), Rv1641 (SEQ ID NO:234), Rv3005c (SEQ ID NO:427), Rv3759c (SEQ ID NO:582), Rv3800c (SEQ ID NO:532), Rv0187 (SEQ ID NO:30), Rv2379c (SEQ ID NO:338), Rv2434c (SEQ ID NO:352), Rv2940c (SEQ ID NO:574), Rv3477 (SEQ ID NO:580), Rv0435c (SEQ ID NO:72), Rv0844c (SEQ ID NO:128), Rv0856 (SEQ ID NO:561), Rv1191 (SEQ ID NO:564), Rv2803 (SEQ ID NO:397), Rv0783c (SEQ ID NO:118), Rv1054 (SEQ ID NO:563), Rv1689 (SEQ ID NO:240), Rv2539c (SEQ ID NO:572), Rv2859c (SEQ ID NO:573), Rv3777 (SEQ ID NO:528).

[0070] In additional methods, to identify serodiagnostic antigens, t-tests for each reactive antigen were performed comparing normalized signal intensities of TB-cases to controls, and exemplary results are shown in FIG. 2A. Here, Cyber T-tests revealed signals for 23 antigens as significantly different between the smear-positive TB cases (n=13) and the LTBI-negative controls (n=69). These antigens are shown in the histogram by the average of their normalized signal intensities for the two patient groups, and ranked in descending order of the signals in the smear-positive group. The p-value for each antigen is also shown (top), arranged so that the more significant antigens produce downward pointing spikes.

[0071] Based on probing sera from 48 LTBI-negative subjects and 50 TB culture positive subjects, a total of 31 antigens were found to discriminate between these groups and were considered serodiagnostic as depicted in FIG. 2B. It was further found that combining multiple antigens produces a test with increased specificity and sensitivity. The top 2 discriminatory antigens have an AUC of >0.88, and the addition of another 3 antigens to the classifier improves the AUC score to >0.90. Using 10 antigens gives an AUC score of >0.93. Remarkably, further addition of antigens does not improve the AUC score of the classifier. For the sera in this study the top 10 discriminatory antigens yields a sensitivity of >80% identification of true negatives and a sensitivity of >90% for finding the true positives. These results clearly support the ability of whole proteome chips using ORFeomes created using enzymeless recombination cloning, and proteomes expressed using E. coli based cell free expression systems, as valid tools for serodiagnostic antigen discovery. These classifiers will benefit from a larger, more comprehensive profiling study of well characterized serum samples.

[0072] The inventors then studied the diagnostic power of different numbers of ORFs using receiver operating characteristic (ROC) curves. A ROC curve is a parametric plot of the false positive rate (1—specificity) vs. the true positive rate (sensitivity) of a classifier as the underlying discrimination threshold is varied. The area under the curve (AUC) summarizes the results. An AUC of 1.0 indicates a perfect classifier, while an AUC of 0.51 (95% confidence interval, 0.43 to 0.59) is the expected value for a classifier that works by chance for the data set, as inferred by the method of Truchon and Bayly (J Chem Inf Model 47(2): 488-508). For multiple antigens, kernel methods and support vector machines were used (Bioinformatics: the Machine Learning Approach, Second Edition edn.: MIT Press) to build linear and nonlinear classifiers. As input to the classifier, the highest-ranking 1, 2, 5, 10, and 30, ORFs were used on the basis of either p-value or single antigen AUC and the results were validated with 10 runs of threefold cross-validation. The results (data not shown) showed that increasing the antigen number from 1 to 5, and from 5 to 10 produced an incremental improvement in the classifier. Increasing numbers beyond this did not improve the algorithm's ability to discriminate the two populations. Contingency tables built on these data showed that using 10 antigens at an optimal threshold provides an accuracy of 94% of the true positives and 78% of the true negatives.

[0073] Alternatively, antigen selection was also performed as follows: Raw data were distributed into the two groups of the query and subsets were normalized using vsn on the control spots. A CyberT test was run on the normalized data, and SVM classifier was built with a subset of the top antigens. Duplicates were removed. Each sample included meta data that was used to build each of the 10 queries, and each group was a disjoint subset of the original data, and each query only had two groups. Data were normalized using arsinh normalization (Bioinformatics, 18 Suppl 1, 2002), which compensates for variance dependence on mean. An affine-linear transformation (scale all value+add a value) was performed on each sample to compensate for shifts between samples, thus allowing a t-test on the normalized data. The CyberT test was used to estimate the variance of a spot by using neighboring spots (Bioinformatics, 17(6):509-519, 2001), giving a statistical measure of the difference in means between two groups for a particular antigen. Subsetting the p-values: Antigens are subset based on the significance of the p-value. Multiple test correction is used, and antigens are subset on the Bonferroni or the Benjamini-Hochberg p-value (<0.05) in most cases. Building a (SVM) classifier: Classifiers were built using a number of the top antigens to provide an estimate of what classification accuracy we could be obtained for each query. This allows for determination of the optimal number of antigens to be included in the final classifier. 3-fold cross-validation was used and ROC plots were generated to visualize the results. A list of exemplary results using this analysis is provided in the list of serodiagnostic antigens shown in FIG. 2C.

[0074] Enrichment analysis: To determine the features of proteins that were enriched in the immunodominant antigen set, proteins were classified into one of 11 functional categories according to the TubercuList genome database (http://genolist.pasteur.fr/TubercuList/). The number of ‘hits’ for each category was determined in the immunodominant antigen set. 7 immunodominant antigens were considered serodiagnostic, of which 4 (57.1%) were proteins with proline-glutamic (PE/PPE) motifs. Since the whole proteome contains 168 (4.2%) PE/PPE motif proteins, this represents a significant 13.6-fold enrichment relative to the whole proteome.

[0075] Importantly, none of the 167 ‘cross-reactive’ immunodominant antigens were significantly enriched in any of the functional categories. The number of serodiagnostic antigens could be increased to 31 if all antigens were assessed regardless of immunodominance Of these, 6 (19.4%) were virulence factors and 10 (32.2%) were PE/PPE motif proteins, representing a significant 7.7-fold enrichment for both, relative to the whole proteome. Interestingly, molecules involved in intermediary metabolism were significantly underrepresented (0.1-fold enrichment) in the serodiagnostic set relative to the whole proteome.

[0076] Several computational predictions were also made to classify the antigens. Lipoproteins and cell wall proteins were not enriched in the serodiagnostic antigen set, whereas possession of a signal sequence or an extracellular classification by PSORTb were enriching. High coil content, high glycine and high proline were all enriching features. PE/PPE molecules, characterized as having highly conserved proline rich motifs 100-200 amino acids long with high coil content near the N-terminus, were significant enriching features. Twenty-six out of 31 molecules in the serodiagnostic antigen set were negatively charged with isoelectric point <6.7. Again, none of these predicted features were enriched in the cross reactive antigen set.

[0077] Comparison of fluorescence and colorimetric detection of bound antibodies: The ability to replace fluorescence detection with a colorimetric methodology would assist in wider deployment of the arrays where fluorescence scanners would be impractical or where a smaller device would be preferable, such as in high containment laboratories or routine diagnostic laboratories. However, it was not known whether a colorimetric readout would have a reduced sensitivity or dynamic range compared to fluorescence. With this aim the HIS and HA tag-specific monoclonal antibodies were visualized with appropriate alkaline phosphatase-conjugated secondary antibodies and the arrays were developed with nitro-TB developer. Grey scale 2400 dpi resolution TIFF images were obtained using a conventional desktop document scanner and scatter plots of the 4608 data points compared with fluorescent detection. The correlation for signals for the HIS and HA tags were high (r2=0.8186 and 0.9259, respectively). Fluorescence based detection gave 99.2%, 97.0%, 96.6% and 0.4% for poly-His tag detection, HA tag detection, both tag detection and no tag detection, respectively. Colorimetric based detection gave 93.7%, 88.6%, 84.8% and 2.5% for poly-His tag detection, HA tag detection, both tag detection and no tag detection respectively. While fluorescence based detection is somewhat more sensitive (since there were fewer ‘double negatives’), alkaline phosphatase based detection is a comparable alternative that can be performed with only basic equipment. FIG. 3 depicts representative scans of arrays proved with antibodies to (A) HIS and (B) HA tag antibodies and visualized by fluorescence and colorimetric means; scatter plots are of colorimetric vs. fluorescence data.

[0078] Further illustrative exemplary methods and protocols are provided in the parent application PCT/US07/23299 (published as WO2008/140478), which is incorporated by reference herein.

[0079] Thus, specific embodiments and applications of compositions and methods related to antigens of M. tuberculosis have been disclosed. It should be apparent, however, to those skilled in the art that many more modifications besides those already described are possible without departing from the inventive concepts herein. The inventive subject matter, therefore, is not to be restricted except in the spirit of the appended claims. Moreover, in interpreting both the specification and the claims, all terms should be interpreted in the broadest possible manner consistent with the context. In particular, the terms “comprises” and “comprising” should be interpreted as referring to elements, components, or steps in a non-exclusive manner, indicating that the referenced elements, components, or steps may be present, or utilized, or combined with other elements, components, or steps that are not expressly referenced. Furthermore, where a definition or use of a term in a reference, which is incorporated by reference herein is inconsistent or contrary to the definition of that term provided herein, the definition of that term provided herein applies and the definition of that term in the reference does not apply.

### Sequence Listing

[0080] The Sequence Listing providing sequences with the SEQ ID NO:1 to SEQ ID NO:586 is submitted as a single file in computer readable format, wherein the single file is entitled “101519.0003US4_SequenceListing_ST25.txt”, which was created Jul. 9, 2012, which has a size of 950 kb, and which is incorporated by reference herein.

The application's sequence listing, which the Patent Office published only in electronic form, follows.

SEQUENCE LISTING (588 sequences)

SEQ ID NO: 1 - DNA, 2517 bp, Mycobacterium Tuberculosis
atgacagacacgacgttgccgcctgacgactcgctcgaccggatcgaaccggttgacatcgagcaggagatgcagcgcagctacatcgactatgcgatgagcgtgatcgtcggccgcgcgctgccggaggtgcgcgacgggctcaagcccgtgcatcgccgggtgctctatgcaatgttcgattccggcttccgcccggaccgcagccacgccaagtcggcccggtcggttgccgagaccatgggcaactaccacccgcacggcgacgcgtcgatctacgacagcctggtgcgcatggcccagccctggtcgctgcgctacccgctggtggacggccagggcaacttcggctcgccaggcaatgacccaccggcggcgatgaggtacaccgaagcccggctgaccccgttggcgatggagatgctgagggaaatcgacgaggagacagtcgatttcatccctaactacgacggccgggtgcaagagccgacggtgctacccagccggttccccaacctgctggccaacgggtcaggcggcatcgcggtcggcatggcaaccaatatcccgccgcacaacctgcgtgagctggccgacgcggtgttctgggcgctggagaatcacgacgccgacgaagaggagaccctggccgcggtcatggggcgggttaaaggcccggacttcccgaccgccggactgatcgtcggatcccagggcaccgctgatgcctacaaaactggccgcggctccattcgaatgcgcggagttgttgaggtagaagaggattcccgcggtcgtacctcgctggtgatcaccgagttgccgtatcaggtcaaccacgacaacttcatcacttcgatcgccgaacaggtccgagacggcaagctggccggcatttccaacattgaggaccagtctagcgatcgggtcggtttacgcatcgtcatcgagatcaagcgcgatgcggtggccaaggtggtgatcaataacctttacaagcacacccagctgcagaccagctttggcgccaacatgctagcgatcgtcgacggggtgccgcgcacgctgcggctggaccagctgatccgctattacgttgaccaccaactcgacgtcattgtgcggcgcaccacctaccggctgcgcaaggcaaacgagcgagcccacattctgcgcggcctggttaaagcgctcgacgcgctggacgaggtcattgcactgatccgggcgtcggagaccgtcgatatcgcccgggccggactgatcgagctgctcgacatcgacgagatccaggcccaggcaatcctggacatgcagttgcggcgcctggccgcactggaacgccagcgcatcatcgacgacctggccaaaatcgaggccgagatcgccgatctggaagacatcctggcaaaacccgagcggcagcgtgggatcgtgcgcgacgaactcgccgaaatcgtggacaggcacggcgacgaccggcgtacccggatcatcgcggccgacggagacgtcagcgacgaggatttgatcgcccgcgaggacgtcgttgtcactatcaccgaaacgggatacgccaagcgcaccaagaccgatctgtatcgcagccagaaacgcggcggcaagggcgtgcagggtgcggggttgaagcaggacgacatcgtcgcgcacttcttcgtgtgctccacccacgatttgatcctgttcttcaccacccagggacgggtttatcgggccaaggcctacgacttgcccgaggcctcccggacggcgcgcgggcagcacgtggccaacctgttagccttccagcccgaggaacgcatcgcccaggtcatccagattcgcggctacaccgacgccccgtacctggtgctggccactcgcaacgggctggtgaaaaagtccaagctgaccgacttcgactccaatcgctcgggcggaatcgtggcggtcaacctgcgcgacaacgacgagctggtcggtgcggtgctgtgttcggccggcgacgacctgctgctggtctcggccaacgggcagtccatcaggttctcggcgaccgacgaggcgctgcggccaatgggtcgtgccacctcgggtgtgcagggcatgcggttcaatatcgacgaccggctgctgtcgctgaacgtcgtgcgtgaaggcacctatctgctggtggcgacgtcagggggctatgcgaaacgtaccgcgatcgaggaatacccggtacagggccgcggcggtaaaggtgtgctgacggtcatgtacgaccgccggcgcggcaggttggttggggcgttgattgtcgacgacgacagcgagctgtatgccgtcacttccggcggtggcgtgatccgcaccgcggcacgccaggttcgcaaggcgggacggcagaccaagggtgttcggttgatgaatctgggcgagggcgacacactgttggccatcgcgcgcaacgccgaagaaagtggcgacgataatgccgtggacgccaacggcgcagaccagacgggcaattaa

SEQ ID NO: 2 - DNA, 1098 bp, Mycobacterium Tuberculosis
gtggcgatcttcggtcgatggagtgcgcgccagcgactccggagagcgacccgggaatccctcacgattccgacgtttagctcctcgctggattgcaccacacgggtaattggcgggctctggcccgctgagctttcgtctaacaccgccgaaaccgccacgcttgcagaacatctgaaagcggatctgcatcggatagttggttctgccaacgacgagctgatggtcatctggcgtgcggggatggctgattcgacgcgacgcgcagaagaagacagagtgatcgaccgcgcccgcgcgtcggcgatgcgtcgcgtcgagtcggcgatgcgcgagcttcggcagataacggggcgcgttcccgtggaaattccgcgtatgcgcggcgccggcggctcggatctggacacgacacgactcatgccggccgtcacggtagttcagcccgctgaccaggcctgtacggattggccggttgccgccgccgaggatgacgaagcccgactgcagcgcctcctggcgttcgtggctcgtcaggagccacggctgaactgggcggtcggcgttcacgcggacggcacgacggtcctggtcaccgacgtcgcccatggttggatacctccgggcatcgcccttcccgaaggcgtgcgattgttggcaccggcgcgacgcgccggcagagcccccgagttggtcggtatcacgacgtgttgcaagacgtacacccccggtgactcgctgcgtcgggcggtcgattcaaccgcgccgacgtcctcggtgcagccgcgagcgttgccagcgatcgccggcctgagtgtggagctgggcatagcgacccagcggcacgacggcttaccgaagatcgtgcacgccatggccacggcggccggcaacggcgccgccgccgaggaagtcgacctgttgcgggtgcacgtcgataccgcgctccaccacgtcttggcccagtatccccgggtcgatccggcgttactgctcaactgtatgttgttggccgccaccgagcgcagcgtcacgggagacccgatcgcggcgaactatcacttcgcgtggttccgggaactcgattcacgccgatag

SEQ ID NO: 3 - DNA, 213 bp, Mycobacterium Tuberculosis
ttgctggcaaggcatttcggcgcggggcgcaaggcccacagccgggccgtggccaccctgaaagccgatatccaagcctggcacccggctggcatccagaccccgaagccgcgatgcgaatcagatgtgttcgcgcgaatcggtcacacgagccacccatcaactcggaagagccgggtggggccgggagcatccgaggcaccgcttgcctga

SEQ ID NO: 4 - DNA, 1689 bp, Mycobacterium Tuberculosis
atgacggcggccttgctttcaccagccatcgcctggcagcagatctcggcttgcacggaccgcacgctgacgatcacttgcgaggattccgaggtaatcagctatcaggacctcatcgcgcgcgcggcggcatgcatccccccgctacggcgtcttgacctcaaacgcggtgaacccgtgctgatcaccgcccacaccaacctggaattcctgtcctgctttttgggcctcatgctccatggcgctgtgccggtacccatcccgccgcgggaggcactgaagaccaccgagcgtttcatgactcggctcggcccactgctgcgccatcaccgcgtgctgatctgcacaccggccgaacacgacgagatacgcgctgccgccagcaccgactgccagatcagcagatttactgccctagccgaggctggcgacgagcagttcggccgcgccacggcccagcaactcgccgacaccgccaccgccgactggccgctatgcaccctcgacgacgacgcctacgtccaatacacctctggcagcaccgcagcaccacgcggagtggtcatcacctaccgcaacctgctgtccaacatgcgcgcaatggccgtgggctcacaattccagcacggcgatgtcatgggcagctggctgcccttgcaccatgacatggggctggtgggcagcctattcgccgcactcttcaacagtgtcagcgcggtattcaccacgccacaccggtttctgtatgacccgttgggattcctcagactgctcaccagctccggggctacccacacgttcatgcctaacttcgctctggagtggctgatcaacgcctaccacaggcgcggcgccgacatcgaaggcatcgacctacacaaaatgcgccgcttgatcatcgcctccgaacccgtccatgccgagggcatgcggagattcgccgccaccttcgccggcgtcggacttgcccccacggccctgggttcgggctatggcctggccgaagcgaccgtcgccgtgtcgatgtcagcgcccaacacgggattccgcaccgaaacccacgccgccgcggaggtcgtcaccggcggccgagtgctgcctggctacgaggtgcgcattgacgccgcaccaggtgcccgggccggaacgatcaaactgcgcggcgacagcgtggccgccaaagcctatgtgggcgggaagaagctggacgcgctcgacgaggaaggcttctgcgacacccacgacttgggttttcttgtagacgacgaaatcgtcatccttggccggcaggacgaggtgttcattgtccacggagaaaacagattcccctacgacatcgagttcatcattcgcggggaatccgagcagcaccggaccaaagtcgcatgtttcggggtcaacgaacgcgtcgtggttgtgttggaaagcccattggacagcatcatcgacaaggccgaagccgaccgactgagatgtcaagtcgttgccgcgactgggctgcagttggatgaactgatcacggttcggcgcggcgcgattcccaccaccaccagcggcaagctcaaacgacgcgccgtcgcgcaggcttatcgagacggcacactgccccgtcttgccacccacgcgtggacggcggatcccgatagcgctcccaaaacgacccggtccagcctggaaggcgcccactga

SEQ ID NO: 5 - DNA, 933 bp, Mycobacterium Tuberculosis
atgatccagatcgcgcgcacctggcgggtcttcgcaggcggcatggccaccggtttcatcggcgtggtgctggtcaccgccgggaaggcctcagcggatcccctgctgccaccgccgcctatccctgccccagtctcggcgccggcaacagtcccgcccgtgcagaacctcacggcgcttccgggcgggagcagcaacaggttctcaccggcgccagcacccgcaccgatcgcgtcgccgattccggtcggagcacccgggtccaccgctgtgcccccgctgccgccgccagtgactcccgcgatcagcggcacacttcgggaccacctccgggagaagggcgtcaagctggaggcacagcgaccgcacggattcaaggcgctcgacatcacactgcccatgccgccgcgctggactcaggtgcccgaccccaacgtgcccgacgcgttcgtggtgatcgccgaccggttgggcaacagcgtctacacgtcgaatgcgcagctggtggtgtataggctgatcggtgacttcgatcccgctgaggccatcacacacggctacattgacagccagaaattgctcgcatggcagaccacaaacgcctcgatggccaatttcgacggctttccgtcatcaatcatcgagggcacctaccgcgaaaacgacatgaccctcaacacctcccggcgccacgtcatcgccacctccggagccgacaagtacctggtttcgctgtcggtgaccaccgcgctgtcgcaggcggtcaccgacgggccggccaccgatgcgattgtcaacggattccaagtggttgcgcatgcggcgcccgctcaggcgcctgccccggcacccggttcggcaccggtgggactacccgggcaggcgcctgggtatccgcccgcgggcaccctgacaccagtcccgccgcgctag

SEQ ID NO: 6 - DNA, 495 bp, Mycobacterium Tuberculosis
gtggctggtgacaccaccatcaccatcgtcggaaatctgaccgctgaccccgagctgcggttcaccccgtccggtgcggccgtggcgaatttcaccgtggcgtcaacgccccggatctatgaccgtcagaccggcgaatggaaagacggcgaagcgctgttcctccggtgcaatatctggcgggaggcggccgagaacgtggccgagagcctcacccggggggcacgagtcatcgttagcgggcggcttaagcagcggtcgtttgaaacccgtgagggcgagaagcgcaccgtcatcgaggtcgaggtcgatgagattgggccttcgcttcggtacgccaccgccaaggtcaacaaggccagccgcagcggcgggtttggcagcggatcccgtccggcgccggcgcagaccagcagcgcctcgggagatgacccgtggggcagcgcaccggcgtcgggttcgttcggcggcggcgatgacgaaccgccattctga

SEQ ID NO: 7 - DNA, 2625 bp, Mycobacterium Tuberculosis
atggcggtcgttgatgacctagcgcccggcatggactcctcaccgcccagtgaagattacggccgtcaaccaccgcaggatctcgccgccgagcagtccgtgctgggcgggatgttgctgagcaaggacgccatcgccgatgtactggaacggctacggcccggcgatttttatcgtccggcgcatcagaacgtctacgacgccattttggacctgtatgggcggggagaaccggctgatgcggtgacggtggccgccgaactggatcgccgtgggctgctgcgccgcatcggcggtgctccctacctgcacaccctgatctcgacggtgccgacggccgccaacgcgggctactacgcgagcatcgttgccgaaaaggcgctgctgcgccggctggtagaggccggaacccgggtggtgcagtacggctatgccggcgccgaaggcgcggatgtggccgaggtggtcgatcgcgcgcaggccgaaatctacgacgtcgcggatcggcggctgtcggaagactttgtggcgcttgaggacctgctgcaaccgacgatggacgagatcgatgccatcgcttccagtggcggcctggcgcgcggggtggctaccggcttcaccgaactcgacgaggtcaccaacggcctgcatccggggcagatggtcatcgtggcggcgcgcccgggcgtgggaaagtccacccttgggctggacttcatgcggtcatgctcgatcaggcatcggatggccagcgtcatcttctcgctggagatgagcaagtccgagattgtcatgcgactgctgtcggcggaggccaaaatcaagctctccgacatgcgttcgggccggatgagcgatgacgactggacccggctggcgcggcggatgagcgaaatcagcgaagcgccactgtttatcgacgactcgcccaacctgaccatgatggagatccgtgccaaggcgcgccgcctgcggcaaaaggccaacctgaagttgatcgtggtcgactacctgcaactgatgacctcgggcaagaagtatgaatcacggcaggtggaggtgtcggagttctcgcggcatctgaagctgttggcaaaagagcttgaggttcccgtggtcgcgatcagccagctcaaccgtgggcccgagcagcgtaccgataagaaaccgatgctggccgacctcagggaatcgggctgcctgaccgcgtccaccagaatcttgcgcgccgataccggcgctgaggtcgccttcggtgagctcatgcgaagcggtgaacgtcccatggtgtggtcgctggacgagcggctgcgcatggtggcccggccgatgatcaacgtgttcccgagcgggcgcaaggaagtgtttcggcttcggctggcttccggacgcgaagtcgaggccaccggcagccacccctttatgaagttcgaaggctggactcccttggcgcagttgaaggttggtgaccggatcgcagcaccgcgccgggtacctgagcccatcgacactcagcggatgcccgagtctgagctcatttcgctggctcgcatgatcggtgacgggtcgtgcctgaagaaccagccgatccgctacgagccggtggatgaggcgaacctggccgcggtgacggtctcggcggcgcactcggatagggctgcgatccgcgacgactacctcgcagctcgagtgccgtcgttgcgcccggcgcggcaacgactaccgcgcgggcggtgcacgccgattgcggcgtggctggctggcctagggctattcacgaaacgcagccacgaaaaatgcgtaccggaggctgtatttcgcgcccccaatgaccaggtggcgttgtttctgcggcatctgtggagcgctggtggctctgttcggtgggatcccacgaatggtcaaggccgggtctactacggctcaaccagtaggcgtctcatcgacgatgtggctcaattgctgcttcgggttgggattttttcctggatcacacacgccccaaagttgggcggccacgattcgtggcggctgcacattcatggcgcgaaggatcaggtcaggttccttcgtcacgtcggcgttcacggcgccgaagcggtggcggcccaagagatgctgcgtcagctcaaaggaccggttcgcaacccgaacctggacagcgcgccgaaaaaagtatgggcgcaagtccgcaaccgactgtccgccaaacagatgatggacatccagctccacgaaccgacgatgtggaagcattccccgagccggtcaaggccgcatcgcgcggaggcgcggatcgaagatcgagcgatccatgagctggcgagaggcgacgcgtactgggacaccgtcgtggagatcaccagcattggagatcaacatgttttcgatgggactgtaagcggcacacacaatttcgtcgccaatggcattagtttgcacaattcgctggaacaagatgccgacgttgtcatcctgctgcatcgacccgacgcctttgaccgcgacgatccacgtgggggagaagcggatttcattctcgccaaacaccgcaacggtccgacgaagacggtcaccgtagcgcatcaactgcacctgtcacgcttcgccaacatggctcggtga

SEQ ID NO: 8 - DNA, 2238 bp, Mycobacterium Tuberculosis
atgagcgccgaacagccgaccatcatttacacgctgaccgacgaggcgccgctgctggcgacctacgcctttctgccgattgtgcgtgcctttgccgaaccggcgggcatcaagatcgaggccagcgacatctctgtagcggcacgcatcctggcggaattccccgattacctgaccgaggagcagcgggtaccggataacctcgccgaactgggccggctgactcagctacccgacaccaacatcatcaagctgccgaacatcagcgcctcggtgccacagctggtagccgccatcaaggaactgcaagacaagggttacgcggtcccagactacccggcggacccgaagactgaccaggagaaggccatcaaagagcgctacgccagatgcctgggcagcgcggtgaacccggtactgcgccaaggcaattcggaccgtcgggcgcccaaggcggtgaaggagtacgcgcgcaagcacccgcacagcatgggcgagtggtcgatggcctcacgcacccacgtagcgcacatgcggcacggtgacttctacgccggcgagaagtcgatgacactggaccgcgcgcgcaacgtgaggatggaactgctggccaagagcggcaagacgatcgtgctcaagcccgaggtgccgctggatgacggcgacgtcatcgacagcatgttcatgagcaagaaagcgctgtgcgacttctacgaagagcagatgcaggatgcgttcgagaccggcgtgatgttctccttgcacgtcaaggcgaccatgatgaaggtcagccaccccatcgtcttcggccacgcggtcaggatcttctacaaggacgccttcgccaagcaccaggagctgttcgacgacttgggcgtcaacgtcaacaatggcttgtccgatctgtacagcaagatcgagtcgctgccggcgtcgcaacgcgacgagatcatcgaggacctacaccgttgccacgaacaccgccccgagctcgcgatggtcgattcggccagaggtatctccaacttccactcgccgagcgatgtgatcgtggacgcctcgatgcccgcgatgattcgcgcgggcggcaagatgtatggcgccgacggaaagctcaaggacaccaaggcggtcaacccggagtccaccttctcgcgcatctatcaggagatcatcaacttctgcaagacaaatggccagttcgatccgacgacgatgggcaccgtccccaatgtgggtctgatggcccagcaggccgaggagtacggctcgcacgacaagacgttcgagattcccgaggacggcgtcgccaacatcgtcgatgtcgccaccggcgaggtgctgctgaccgagaacgtggaagccggcgacatctggcgcatgtgcatcgtcaaggacgcaccgatccgtgactgggtcaagctggctgtcacccgcgcgcgcatctccgggatgccggtgctgttctggctggacccgtaccgcccgcacgagaacgagctgatcaagaaggtcaagacatacctgaaagatcacgacaccgaaggtctggacatccagatcatgtcgcaagtgcgatccatgcgctacacgtgcgagcgcctggtccgtggactggacaccatcgccgcgaccggcaacatcctgcgcgactacctcaccgacctgttcccgatcctggagttaggcaccagcgccaagatgctgtccgtcgttccgctgatggccggcggcggaatgtacgagacgggggcgggcggttcggcacccaagcacgtcaaacaattggtggaggagaatcacctgcgctgggattctctgggtgagttcctcgcgctgggcgccggtttcgaggatatcggcatcaagaccggtaacgagcgggccaaactcttgggtaagaccctggatgccgccatcggcaagctgctggacaacgacaagagtccgtcgcgcaaaaccggtgaactcgacaaccggggcagccagttctacctcgccatgtactgggcacaagagctggccgcgcagaccgacgaccagcagctggccgaacacttcgcctcgctggcagatgtgttgaccaaaaacgaagacgtcatcgtgcgagagctcaccgaggtacaaggcgaaccggtggacatcggcggctactacgcgccggacagcgacatgactacggcggtgatgcggcccagcaagacgttcaatgcagcgctggaggctgtccaaggctga

SEQ ID NO: 9 - DNA, 708 bp, Mycobacterium Tuberculosis
atgagttcgatcacggtgtcggtggacccggtggacccggtggacccggtggacccggtggacccggtggacgccgtggtcgccgcgggatcagacgggctcactgtggcccgcatcgagtccgagatcggggccttggagttcctgaacgaactgcgcactgaactcaagagtggacagtttcgacctcaaccggtgcgggaacgcaagatccccaaaccgggcgggttgggcaaggtacggcggctggggattcccacagtggccgaccgggtcgttcaggcggcgttgaaactggtgctagaacccatctttgagaccgacttcgagccggtctcctacgggtttcggcccgcgcgacgcgcgcacgacacgatcgctgagattcacttgttcggcacccaggagtatcgctgggtgctcgacgctgatatcaaggcgtgctttgaccgcatcgaccacgcggacctgatggaccgggtgcgtcaccggatcaaagacaagcgggtgttgcggctggtgaactggcagcgcattcggcatcgctggaattggaccgacgtccgccgctggctcaccgaccccaccgggcggtggcaccccatcagcgcggacgggatcaccctgtttaaccccgccgcggtgcccattcggcgataccgctatcggggcaacacgatccccactccctggactcaggctgtctga

SEQ ID NO: 10 - DNA, 1050 bp, Mycobacterium Tuberculosis
atgctcttcgcggccctgcgtgacatgcaatggagaaagcgccgcctggtcatcacgatcatcagcaccgggctgatcttcgggatgacgcttgttttgaccggactcgcgaacggcttccgggtggaggcccggcacaccgtcgattccatgggtgtcgatgtattcgtcgtcagatccggcgctgctggaccttttctgggttcaataccgtttcccgatgttgacctggcccgagtggccgctgaacccggtgtcatggccgcggccccgttgggcagcgtggggacgatcatgaaagaaggcacgtcgacgcgaaacgtcacggtcttcggcgcgcccgagcacggacctggcatgccacgggtctcagagggtcggtcaccgtcgaaaccggacgaagtcgcggcatcgagcacgatgggccgacacctcggtgacactgtcgaggtcggcgcgcgcagattgcgggtcgttggcattgtgccgaattccaccgcgctggccaagatccccaatgtcttcctcacgaccgagggcttacagaaattggcgtacaacgggcagccgaatatcacgtccatcgggatcataggtatgccccgacagctgccggagggttaccagactttcgatcgggtgggcgctgtcaatgatttggtgcgcccattgaaggtcgcagtgaattcgatctcgatcgtggctgttttgctgtggattgtggcggtgctgatcgtcggctcggtggtgtacctttcggctcttgagcggctacgtgacttcgcggtgttcaaggcgattggcacgccaacgcgctcgattatggccgggctcgcattacaggcgctggtcattgcgttgcttgcggcggtggtgggcgtcgtcctggcgcaggtgttggcaccactgtttccgatgattgtcgcggtacccgtcggtgcttacctggcgctaccggtggccgcgatcgtcatcggtctgttcgctagtgttgccggattgaagcgcgtggtgacggtcgatcccgcgcaggcgttcggaggtccctag

SEQ ID NO: 11 - DNA, 1236 bp, Mycobacterium Tuberculosis
atgggcgatctgagcattagccaggtgtcggcgcgtccgggacggatcgggattcgcgctaggcaaatgttcgacggataccggtttcagcgtggtcccgtgctggtcgtggtcgaggatggtcggatcagcgcggtcgattttgctggctccgcctgccccgatatgaacctggttgatctgggtgaatcgactttgttgccgggtctggtggatgcgcatgcgcatttgtgctgggaccccgacggtaggccagaggatttggccggcgacccccatgcggtgctggtgggacgggcgcgacggcacgccgcggccgcgttgcgctccgggatcaccacgattcgcgatctcggcgaccgtgactatgcggccttggcgctgcgggaggagtatcggcagaaaacgacggtggggccggaactggtggtttctgggccaccattgactcgcagcggcgggcattgctggttcctcggcggcgtggccgatagcgtcgaggagctggttgatgcggtgcaggagcgggccgcgcggggagcggattggatcaaggtgatggccacgggcggattcgttaccacagcatccgatccgtggcagccgcagtacggcagcggccaactggccgcggtggtggcggccgccgagcaggtaggtctaccggtgaccgcacatgcacatgccaccgcagggatcgccgcggcggtcgccgcgggtgttgacggcatcgagcactgcacgttcttgagcgaaggcagcgccgccgccagcccggatgttgttgaagcgattgttgcccaaggtgtgtggtgcggtatgacgattccccgggtgtatccggagatgccggagaaccttgtcgcggttgtgcaggatggatggcgaaacatccgccggctcatcgacgccggtgcgcgtgtcgccctgtccaccgacgctggagtcgccccgggcagacgccatgacgtgctccccgacgatttggtgtatctgtctcgacacgggttcaccagcacagaggtgctgaccggcgccaccgcagcggccgctgccagctgtgggctcggccaccgcaagggtcgcatcgcgccgggctacgacgctgatctgctggctgttgcggcaggtgtggaccatgaccccgccggactctgcgacgtcaaagccgtctggcgcagcggaacccaggtaccgctacaagcatccgctgtgggctacaacaccccgtcataa

SEQ ID NO: 12 - DNA, 1173 bp, Mycobacterium Tuberculosis
atgcaggacagcatcttcaatctgttgaccgaggaacagcttcggggtcgcaacacgctcaagtggaactatttcgggcccgatgtagtgccactgtggctggcggagatggactttcccaccgcaccggctgtgctcgacggggtgcgggcgtgcgtcgacaacgaggagttcggctacccgccgttgggcgaggacagcctgccgagggcgacggccgattggtgccgacaacgctacggttggtgcccccgaccggactgggtccgcgtcgtgccggatgtcctgaaggggatggaagtcgtcgtcgaattccttacccggccggagagtccggtcgcgttgccggttccggcttacatgccgtttttcgacgtcctgcacgtcaccggccgccaacgagtggaagtcccaatggtgcagcaagactcgggacgctacctgctggacctggacgctctgcaggccgcgttcgtccgcggtgccggatcggtgattatctgcaatccgaataacccactgggtacggcgttcaccgaagccgagctacgtgcgattgtggatatcgcggcccgccacggcgcccgggtgatcgcggatgagatctgggcaccggtggtctacggatcgcgccatgtcgccgccgcttcggtgtcggaggcggcggctgaagtcgtggtcacgttggtgtcggcgtccaaaggctggaacttgccgggtctgatgtgcgctcaggtgatcctgtctaaccgccgtgacgcccacgactgggaccggatcaacatgttgcaccgcatgggcgcatcaacggtcggtatccgcgcgaacatcgccgcctaccatcatggcgaatcttggttggacgagctgctcccttatctgcgggcgaaccgtgatcatctggcacgggcgctgccggagttagctcccggggtagaggtcaacgctccggacggtacctacctgtcgtgggtggatttccgtgcgctggctctgccgtctgaaccggcggaatacctgctctcgaaggcgaaggtggcgctgtcgcctggcattccgttcggcgccgcggtgggctcgggatttgcgcggctgaacttcgccaccacccgcgcaatactggatcgggcgatcgaggctatcgcggccgccctgcgcgacatcatcgattaa

SEQ ID NO: 13 - DNA, 1392 bp, Mycobacterium Tuberculosis
atggctataccaccggaggtgcactcgggcctgttgagcgccgggtgcggtccgggatcattgcttgttgccgcgcagcagtggcaagaacttagtgatcagtacgcactcgcatgcgccgagttgggccaattgttgggcgaggttcaggccagcagctggcagggaaccgccgccacccagtacgtggctgcccatggcccctatctggcctggcttgagcaaaccgcgatcaacagcgccgtcaccgccgcacagcacgtagcggctgccgctgcctactgcagcgccctggccgcgatgcccaccccagcagagctggccgccaaccacgccattcatggcgttctgatcgccaccaacttcttcgggatcaacaccgttccgatcgcgctcaacgaagccgattatgtccgcatgtggctgcaagccgccgacaccatggccgcctaccaggccgtcgccgatgcggccacggtggccgtaccgtccacccaaccggcgccaccgatccgcgcgcccggcggcgatgccgcagatacccggctagacgtattgagttcaattggtcagctcatccgggatatcttggatttcattgccaacccgtacaagtattttctggagtttttcgagcaattcggcttcagcccggccgtaacggtcgtccttgcccttgttgccctgcagctgtacgactttctttggtatccctattacgcctcgtacggcctgctcctgcttccgttcttcactcccaccttgagcgcgttgaccgccctaagcgcgctgatccatttgctgaacctgcccccggctggactgcttcctatcgccgcagcgctcggtcccggcgaccaatggggcgcaaacttggctgtggctgtcacgccggccacggcggccgtgcccggcggaagcccgcccaccagcaaccccgcgcccgccgctcccagctcgaactcggttggcagcgcttcggctgcacccggcatcagctatgccgtgcccggcctggcgccacccggggttagctctggccctaaagccggcaccaaatcacctgacaccgccgccgacacccttgcaaccgcgggcgcagcacgaccgggcctcgcccgagcccaccgaagaaagcgcagcgaaagcggcgtcgggatacgcggttaccgcgacgaatttttggacgcgaccgccacggtggacgccgctacggatgtgcccgctcccgccaacgcggctggcagtcaaggtgccggcactctcggctttgccggtaccgcaccgacaaccagcggcgccgcggccggaatggttcaactgtcgtcgcacagcacaagcactacagtcccgttgctgcccactacctggacaaccgacgccgaacaatga

SEQ ID NO: 14 - DNA, 237 bp, Mycobacterium Tuberculosis
gtgcgggaccgaatcctcgccgccgtctgcgacgtgttgtatatcgacgaggcggatctcattgatggcgacgaaacggatctccgcgacctcgggctggactctgttcggtttgttctgctgatgaagcagctaggcgtgaaccgacaatccgaactgccgtcccgattggccgcgaacccgtcgattgcgggttggcttcgcgagctggaggctgtgtgcaccgagttcggttaa

SEQ ID NO: 15 - DNA, 7539 bp, Mycobacterium Tuberculosis
gtgcaccgagttcggttaagccgctcgcagcgcaacctctacaacggcgtgcgccaggataacaatcccgcgttatatctgatcggcaagagctatcggttccgccggttggagctggcgagattcctggccgctctgcacgcaacggtactggacaaccccgtgcaactttgcgtcctggagaattcgggggcagactatccggatctggtgccgcggctacggttcggcgacatcgtgcgggtggggtcagccgatgagcacctgcagagcacatggtgttcgggcatcctgggcaagccactggtgcggcatacggtgcacaccgacccgaacgggtatgtgaccggtctggacgttcacacccaccacatcctgctggacggcggcgcgaccgggacgatcgaagctgacctggcgcgttacctgaccaccgacccggcgggcgaaacccccagtgtcggtgcgggtctagccaagctcagggaggcgcaccgtcgtgagacggccaaggtggaagaatcgcgggggcgcctgtcggctgtcgtgcagcgtgaactcgccgacgaagcataccacggcgggcacgggcacagcgttagcgacgctcccgggaccgcggccaagggcgtcctgcacgaatcggcaacgatctgcggcaacgcgtttgatgccatcctgaccctttcggaagcgcagcgggtcccgcttaatgtgctggtggctgcggcggccgtcgcggtggacgcgagccttcggcagaacaccgaaaccctcttggtgcacacggtggacaaccggttcggagattctgatctgaatgtcgcgacctgtttggtcaattcggttgcccagaccgtccggtttcccccatttgcgtcggtgtccgatgtcgttcgaacgcttgaccgcggctatgtcaaggcggtaagacgccggtggcttcgtgaggagcattaccgccgaatgtatttggcgatcaaccggacatctcacgtggaggcgttgacgctaaatttcattcgcgagccatgcgcacctggcctgcgcccgttcttgtcggaggtcccgattgccacggatatcggtccggtcgagggcatgacggtggcgtctgttctggacgaagaacagcgcacactgaacctagccatctggaaccgagccgatctgcccgcgtgcaagacacaccccaaggtcgcggaacggatagcggcagcgttggaatcgatggcggcgatgtgggatcggccgatcgccatgatcgtcaacgactggttcgggatcggcccggacgggactcgctgccaaggcgattggccagcccgtcagccgtcgacgcccgcgtggtttctcgattccgcaaggggcgtccaccaatttctcggcaggcgccgcttcgtctacccgtgggtcgcgtggttggtgcaacgcggcgccgcaccgggtgatgttctggtgttcaccgacgacgacaccgacaagaccattgacctgctcatcgcgtgtcaccttgcgggttgcgggtacagcgtctgcgacaccgctgacgaaatttccgtgcggaccaatgcgattaccgagcacggcgatggcatcttggtgacagtggtcgacgtggccgccacccagctggcggttgtcggccatgacgagctgcggaaggtcgttgacgagcgcgtcacacaggtgacacacgacgcactgctggccaccaagaccgcctacatcatgccgacctcgggaactaccggacaacccaagctggtgcgaatctcacacggctcgctcgcggttttctgtgatgcgatcagccgcgcctacggttggggagcccacgacaccgttctgcagtgcgctccgttgacatcggacatcagcgtcgaggagattttcggtggcgcggcctgtggcgcgcgactggtgcgatccgcggctatgaaaaccggcgacctggcggcgctggttgacgatctcgtcgcccgcgagacgacaatcgtcgacctgccgaccgccgtctggcagctgttgtgcgccgacggcgacgccattgacgcgatcggccgctcgcgcctgcggcagatcgtaatcggcggtgaagccatccgctgtagcgccgtggacaagtggcttgaatcggctgcttcacaagggatctcgctgctctcgagctatggtccaacagaagccacggtcgtcgccaccttcttgccgatcgtttgcgaccagaccaccatggacggcgcactgctcaggctcggccggccgatcctaccgaacacggtgttcctcgcgttcggtgaagtcgtcattgtcggggatttagtcgccgacggctacctcgggatcgacggcgacggcttcggcaccgtgacggccgcagacggttcccgacgccgtgcctttgccactggcgaccgggtgaccgtcgacgccgaaggatttccggtcttctccggacgcaaagacgccgtcgtcaagatctccggcaagcgtgtcgatatcgctgaggtaaccaggcgcatcgccgaagaccccgcggtgtcagatgtcgccgtcgagttgcacagcggaagcctcggagtgtggttcaagagccaacggacccgcgagggcgaacaagacgctgccgcggcgacccggatcaggctcgtcctcgtgagtctgggagtgtcgtcgtttttcgttgtcggcgtgccgaatatcccgaggaagcccaacgggaagatcgacagcgacaacctgccgaggctgcctcagtggtcagctgctgggctaaacaccgccgagacgggtcagcgagcggccggcctctcgcagatctggagccggcagctcggccgggcaatcgggccggactcgtcgctgcttggtgagggcatcggctcgttggatctcatcagaatactgcccgagacgcgtaggtatctggggtggcgcctctcgctgctggatctgatcggtgccgataccgccgccaatctggccgattacgcgccaacgcccgacgcgccgacgggcgaagatcggtttaggccgctggtggccgcgcaacggcccgcggcgattccgttgtcgtttgcccagcggcgactatggtttctcgaccagttacagcgacccgctccggtctacaacatggcggtggcgttgcggctgcgcgggtatctcgataccgaggcgttgggcgcggcggtcgccgatgtcgtgggccgccacgaaagcctacggacggtgtttccggcggtcgacggggtccctcggcagctggtcatcgaagcgcggcgggcagatcttggctgcgacatcgtcgatgccaccgcatggccggctgaccggctgcaacgggccatcgaggaggcggcgcgccacagcttcgatttggcaaccgagatacctttgcggacgtggcttttccggatcgccgacgacgaacatgtgctggtggcggttgcacaccatatcgccgccgacggctggtcggtggctccgctgacggccgatctgagtgcggcatatgccagccgttgtgcgggtcgggcaccggactgggcgccattgccagtgcagtatgtcgattacacgctgtggcagcgggaaatcctcggtgatctcgacgacagcgacagcccgatcgccgcgcagctggcctactgggaaaatgcgttggccggtatgccggaacggctgcggctgcccaccgctcggccctatccaccggttgccgatcagcgcggcgccagtttggtggtggattggccggcgtcggtgcaacagcaggtgcgtcggatcgcccgccagcacaacgcgaccagcttcatggtggtagctgccgggcttgccgtgctgctgtcgaaactcagcggaagccccgatgtggcggtcggatttcccatcgccggccgcagcgatcctgcgctggataacttggtgggcttttttgtcaacaccttggtgttgcgggtcaacctggccggtgatcccagcttcgccgaactgctggggcaggtgcgagcgcgcagcctggccgcctacgaaaatcaagacgtacctttcgaggtgctcgttgatcgcctcaaacccactcgagccctgacccatcacccgctgatccaggtgatgttggcctggcaggacaatccggttggacagctgaatttgggtgatctgcaggccaccccgatgccgatcgacacccgcaccgcccgcatggacttggtgttttcgttagcggaacgcttcagcgagggtagcgaacctgccgggatcggcggagcggtggaataccgcaccgatgtgtttgaagcccaagcaatcgacgtgcttatcgagcggttgcggaaggtgttggtggcggtggccgctgctccggaacggacggtgtcgtcgatcgatgcgctggatgggaccgagcgtgcccggttggatgagtggggtaaccgcgctgtgctgactgcgcccgcgcccacgccggtgtcgatcccgcagatgttggccgcccaggtggcacgtatccccgaagcggaggcggtgtgttgcggggacgcgtcgatgacgtatcgggaactcgacgaggcgtccaaccggttagcgcatcggctggcaggttgtggggccggcccgggcgagtgtgtggcgctgctgttcgagcggtgcgcgccggcggtcgtggcgatggtggcagtgctcaaaaccggggcggcgtatctgccgatcgatccggcgaatcctccgccgcgggtggcgttcatgctcggcgacgcggtgcccgtggccgcggtcaccacggctgggctgcgctcccggttggcgggacacgacttgccgatcatcgatgtcgtcgatgctttagcggcatatccgggcacgcccccacccatgccggccgcagtgaacctcgcctacatcctgtacacctcgggcactaccggcgagcccaaaggcgtggggatcacccatcgcaacgtcaccaggctgttcgcatcactgccggcacgcttgtcggcggcgcaggtgtggtcgcagtgtcattcctatggcttcgacgcctcggcgtgggagatctggggcgcgttgctaggtggtgggcgactggtgatcgtgcccgagtcggtggcggcctcgccgaacgactttcatgggctgctcgtggccgaacacgtcagcgtgctgactcagactccggctgcggtggcaatgttgccgacgcagggtttggagtcggtggcgttggtggtggccggtgaggcatgtccggcagcgctggtggatcggtgggcgcccgggcgggtgatgctaaatgcttatggcccaaccgagaccacgatctgtgcggcgataagtgcgccgttgcgaccgggttcggggatgccgccgattggtgttccggtgtcgggggcggcgttgtttgtgctggatagctggttgcgcccggtaccggccggggtggccggagagttgtacattgccggtgcgggcgtcggtgttgggtattggcgtcgggcggggctgaccgcgtcacggtttgtggcctgcccattcggcggttccggggcacgcatgtatcgcaccggggatctggtgtgttggcgcgccgatggccagttggagttcctggggcgcaccgacgatcaggtcaagatccgcgggtatcgcatcgagctcggcgaggttgcgaccgcgctggccgagctggctggggtaggtcaagcggttgtaatcgcccgtgaagaccgccctggggacaagcgcctagtcgggtatgccaccgaaattgcccccggggcagtggacccggccgggctgcgggcgcaactagcccagcgattgcccggttacctggtgccagccgcggtggtagtgatcgatgcgcttccgttgacggtcaacggcaaacttgatcatcgtgcgttgccggcaccggaatacggtgataccaacggatatcgcgctccggccgggccggttgagaagaccgtggccggcatctttgcccgggttcttgggcttgagcgggtcggcgtcgacgactcgttcttcgagctcggcggcgattcgctggcggcaatgcgggttatcgccgcgatcaacaccaccctaaacgccgatctgccggtgcgcgcgttgctgcacgcgtcgtcgacgagaggtttaagccagctgttggggcgagatgcccgaccgaccagcgatccgcgcttggtgtctgtgcacggcgacaaccccaccgaggtgcatgccagcgacctcacgctggaccggttcatcgacgccgacacgctggccaccgccgtcaacctgccgggcccgagccccgagctacggacggtcctgctgacgggcgcgacgggtttcctcggacggtatctggtccttgaattgctgcggcggctggacgtcgacggcaggctgatctgtttggtgcgggcggagtccgacgaggatgcgcggcgtcgtctggagaagaccttcgatagcggtgacccggaattgctgcggcacttcaaggagcttgccgccgaccggctggaggtcgtcgcaggcgacaagagcgaacccgacctgggcctggaccaaccgatgtggcggcggctggccgaaaccgtggatttgattgtcgattccgcggcgatggtcaacgcgtttccctaccacgaattgttcgggcccaacgtcgcgggcaccgccgagctgatccgaatcgcgcttaccaccaagctcaaacccttcacctacgtgtcaaccgccgacgtgggtgctgcgatcgagccgtcggcgttcaccgaggacgccgacatccgggtaatcagccccacccgcaccgtcgacggcggctgggctggcggctacggcaccagcaagtgggccggtgaggtgctgctgcgcgaggccaacgacctgtgcgcgctgccggtcgcggtgtttcgctgcgggatgatcctggccgacaccagctatgccggacagctcaacatgtcggactgggtcacccggatggtgttgagcttgatggctaccggcatcgcgcctcgttcgttctacgaaccggactccgagggcaatcggcaacgcgcgcacttcgacgggctgccagtcaccttcgttgccgaggcgatcgcggtgctgggcgcgcgggtggccggctcatcgttggcgggatttgcgacctatcacgtgatgaacccgcacgacgacggtatcgggctcgatgagtatgtggactggctgattgaggccggctacccgatacgccgcatcgatgactttgcggagtggttgcagcggtttgaggccagcctgggcgctctgccggatcggcaacgccggcactcggtgctgccgatgctgctggcgagcaattcccagcgattgcagccgcttaagccgaccagggggtgctccgcgccgaccgaccgattccgtgccgcggtgcgagcggcgaaagtcggctccgacaaggacaatccagacatcccgcacgtgtcggcgccgaccatcatcaactacgtcaccaacctacaactgctcggactgctgtag

SEQ ID NO: 16 - DNA, 4899 bp, Mycobacterium Tuberculosis
gtgaagatcccgggtgtggccactgtcctcggtggtgtgaccaacggagtagcacagacagtgcgagccggcgcccgcttgccggggagtgcggccgcggcggtgcagacgctggccagcccggtgctggagctgaccggcccggtggtgcagtcggtggtgcaaacgactggtcgcgcaatcggggtacgcggttcccacaacgaatcgcctgacggaatgacaccgccggtgcgttggcgcagcggacggcgcgtgcatttcgacctggatccgctactgccattccctcgctggcacgagcatgccgccatggtggaggagccagtccgcaggatcccgggcgtggccgaggcccacgttgagggctcattgggtcggctggtggtcgaacttgaacctgatgcggatagcgacatcgccgtggacgaggtacgtgatgtggtttccgcggtggctgccgacatattcctggctgggtcggtgtcgtcgccgaactcggcaccattcgccgacccaggtaaccccttggcgatcctggtgccgttgaccgctgcggcaatggatctggtagcgatgggtgccacggtcaccggctgggtcgcccgactgcccgccgcaccgcaaaccaccagagccctggccgctctgataaaccatcaaccgcgaatggtgtcgcttatggagtcgcggttgggtcgagtgggcaccgatattgcgctcgccgctacgacggcggcggccaacgggctaacccagtccctgggcacaccgctgctcgatctggtgcaacgcagcctgcaaatctccgaagcggcggcgcaccgtcgcgtatggcgtgaccgcgaacccgcgctggcctcccccagacggccgcaggctccggtggtgcccatcatctcgtcggccggggccaaatcgcaggagccgcgacacagttgggcggctgcggcggcaggcgaggcttcgcacgtcgtggtcggcggatccatcgacgccgcgatcgacaccgccaaagggtcaagggccgggccggtggagcaatacgtcaaccaggccgcaaacggttcgttgatcgccgcggccagtgcactggtggccggcggtggtaccgaggacgcggccggcgcgatcctggccggagtaccacgtgccgcgcacatgggccgacaggcgttcgcggcggtgctgggtcgcgggctcgccaacaccgggcaactagtcctcgaccccggcgcgttgcgccgcctggatcgggtgcgggtggtcgttatcgacggcgcagcgctgcgcggtgacaaccgcgccgtattgcatgcacagggagacgaacccggctgggacgacgaccgcgtctacgaggtcgccgacgccttgctccatggcgagcaggcacccgaacccgaccccgatgaattgccggctaccggtgcccgcttgagatgggctccggctcaagggccgtcggcaacgccggctcagggcctcgagcatgccgacctggtggtcgatggccaatgcgtgggcagcgtcgacgtggggtgggaagtcgacccatacgcaatcccgctgctgcagaccgcgcaccgaaccggagcgcgggtggttttgcgccatgtcgcgggcaccgaagatctatcggccagcgtcggttcgacgcatccgcctggcacgccgttgctgaagttggtgcgtgagttgcgcgcggatcgcggaccggtattgctgatcaccgcggtgcaccgggacttcgcatccaccgatacgttggccgcgttggccatcgctgacgtcggtgtggctctcgacgatccccgcggggcaacaccatggactgccgacctaatcaccggcaccgatctggccgcggcggtgcggatcctgtcagcgcttccggtggcccgggcagccagtgaatccgcggtacacctcgcccaaggtggcaccaccttggccgggctgttgttggtcaccggtgagcaggacaaaaccaccaacccagccagcttccgtcgctggctcaatccggtcaatgccgctgccgcaacggctttggtgtccggaatgtggtcggccgccaaggtgctgcggatgcccgaccccaccccgcaaccgctgaccgcctggcacgcgctggaccccgagatcgtctactcgcggctagccggcggctcccgacccttggccgtcgaacccggaatcccggcctggcggcgcattctggacgacctgtcctacgaaccggtgatggcgccgctgcgcggcccggcacgaaccttggcgcagctggcggtggccacccgccatgaactggccgatccgctgactccgatcctggcggtgggcgccgcagcatcggcgattgtcggcagcaatatcgacgcgctactggtagcgggcgtgatgacggtcaacgcgatcaccggtggggtacaacgattgcgagccgaggcggcggccgccgagctattcgccgagcaggaccagctggtgcgccgggtggtggtgccggcggtagcgactacccgacgtcgactggaggcggcccggcacgccacccggacggccacggtgtcggcgaagtcgctgcgagtcggcgatgtcatcgacctggccgcgccggaggtggtcccggcggatgcgcgcctgctggtggccgaagacctcgaggtcgacgagtcctttcttaccggcgagtcgctaccggtggacaagcaggtggaccccgtcgccgtcaacgaccccgaccgggccagcatgctgtttgagggcagcaccatcgtcgccggacacgcccgcgcgatcgtggtagccaccggagtcggcaccgccgcacatcgcgcgatctcggcggtcgccgatgtcgaaacggcggccggagtccaggcccggctgcgcgagctgaccagcaaagtgctgcccatgacgttggccggcggcgccgcggtgacagctctggcgttgctgcgccgggcgtcgctgcggcaagcggtggccgacggcgtcgccatcgcggtggccgcggtcccggagggtctaccgttggtggccaccctctcccagcttgccgccgcccagcgcctgacggcacgtggggcgctggtgcgctcgcctcgcaccatcgaggcgctgggccgtgtcgacaccatatgtttcgacaagaccggcacactcaccgagaaccgcctgcgggtggtatgcgcgctaccgagcagcaccgcagccgaacgggatccgttgccgcagaccaccgatgcgccctccgccgaggtgctgcgggccgccgcgcgcgcgtccacgcagccccataacggggaagggcacgcgcacgccaccgatgaggcgatcctcgcggcggctagtgcgctggccggttcgcttagtagccaaggcgattcggagtgggtggtgctggccgaagtaccgtttgagtccagtcgcggctacgccgccgcgatcggcagagtgggcaccgacgggataccgatgttgatgctcaagggcgctccggagacgatcctgccgcgctgccgactcgccgacccgggcgtcgaccacgaacatgccgaatccgtggtacgccacctcgccgagcagggcctgcgtgttctggcagtcgcgcagcgcacctgggacaacgggaccacccatgatgacgagaccgacgccgacgctgtcgacgccgtcgcgcacgatctcgagctgatcggctatgtcggattggcggatacggcccggtcttcctcgcgtccgttgatcgaagccttgctggacgccgagcgcaacgtggtgctgatcaccggcgaccatccgatcaccgcccgggcgatcgcccgccagctgggactaccggcggacgcgcgagtcgtgaccggtgccgaacttgccgtcctggacgaggaggcgcatgccaaactcgccgccgacatgcaagtctttgctcgggtcagcccggaacaaaaggttcagattgtggcggcgctgcagcgctgcgggcgagtgaccgcgatggtcggcgacggcgccaacgacgccgcggccatccggatggccgacgtgggcatcggagtgagcgggcgcggttcctctgccgcccgtggggccgccgatatcgtgctgaccgacgatgacctgggcgtgctgctcgacgcgctggtcgagggccgcagcatgtgggccggtgttcgtgacgcggtgacgattctggtcggcggcaatgtgggcgaagttctgttcaccgtcatcgggacggcgttcggggccgggcgggcgccggtggggactcgtcaactgctgctggtgaatctgctcaccgacatgtttcccgcgcttgcggtggccgtcacctcgcagtttgccgaacccgacgacgccgaatacccaaccgatgacgcggccgagcgagcgcagcgcgaacatcgacgtgcggtgctgatcgggcctacgccctcgctggacgcgccattgctgcgtcagatcgttaaccgcggcgtcgtcaccgccgccggcgcaacggcagcctgggccatcgggcgctggactcccggaaccgaacgacgcacggcgacaatgggtttgactgcactcgtgatgacccagctagcgcagacactgctgacgcgccggcacagtccgctcgtcattgccaccgcactgggcagcgccggggtgttggtcggcatcattcaaaccccggttatcagccacttttcgggtgtaccccgctgggaccggtcgcctggacgggcgtcttcagcgccacggcaggagccaccgcagtctcagcgctggcaccgaagtggttggcaagcacagtcggtgtcgtgcaacctgatgaacgccctgacgacgcggaagactctgacgcgggtggatagaacctatcgacgccctcggtag

SEQ ID NO: 17 - DNA, 1578 bp, Mycobacterium Tuberculosis
atggcatccgacttcggcccgcgcatcgccgatcttgtcgaggtggcggcgacccggctgcccgaggctccggcgctcgtcgtcaccgcggatcgcatcgcgatcagccaccgcgacctggcccgtctggttgatgagctggccggccagctgacgcggtccggcctgctgcccggtgaccgggtcgcgctgcgcatgggcagcaacgccgaattcgtcgtcgccttgctggcggcgtcgcgtgcggatctcgtcgtcgtgccgctggatccggcgctgcccatcaccgagcaacgcgtccgaagccaggccgcgggagcccgggtggtgctgattgacgcggatgggccgcacgacagggcagaacccaccacccggtggtggccgctcacggtgaacgtcggcggtgacagcggcccctcgggtggcaccttgtcggtccacctggacgccgccaccgagccgaaccccgcaacctcgacgcccgagggactgcgacccgatgacgccatgatcatgttcaccggcgggacgaccggcctgccgaagatggtcccctggacgcacgcaaacatcgccagctcggtccgcgccatcatcaccgggtaccggctgagcccgcgggacgccaccgttgcggtgatgccgctctaccatggccacgggctgatcgcgtcgttgcttgccaccctggcgtccggcggcgcggtgtcgctgcccgcacgcgggcgattctccgcgcacaccttctgggacgacatcaaagccgttggagccacctggtatacggcggttccgacgattcaccaaatcctgctggagcgatcggcaaccgaaccgtcggggcgcaaacctgccgcactgcgtttcatccgcagctgcagcgcaccgctcactgcccaagccgcgctagcactgcaaaccgagttcgcggcaccggtcgtgtgtgccttcggcatgaccgaagccacccaccaggtaacgacaacgcagattgagggtatcgaccaaaccgaaactcccgtcgtgtcaaccggtctggtcggccggtcgacgggagcgcaaatccggatcgtcgggtccgacgggctgccactgcccgcgggcgcggtcggggagatctggctgcgggggaccaccgtggtacgcgggtatctgggtgacccgacgataaccgccgcgaatttcaccgacggttggttgcgtaccggtgatctcgggtccctgtcggcggccggtgacctgagcatccgcggccgcatcaaggaactcatcaaccgaggtggtgaaaagatctcgcccgagcgcgtcgagggcgtgctggccagccatccaaacgtcatggaggcagccgtattcggcgtcccgcaccagctctacggcgaggcggtcgcggcggtgattgtgcctcgtgagtccgccccgccgactcgcgaggagcttgtccagttctgccgggaacggttggcggccttcgagatcccggcctccttccaggaggccagcgggctgccgcacaccgcgaagggttcgctcgaccgccgcgctgtcgccgaacggttcggccattcggtgtag

SEQ ID NO: 18 - DNA, 2145 bp, Mycobacterium Tuberculosis
atggccgacagagtgaatgcttcccagggcgcggccgccgctcccaccgcaaacgggcccggcggcgttcgcaacgtggttctggtggggccctcggggggcggcaagaccaccctcatcgaggctctcctggtggcggccaaggtgttgtccaggccgggctcggtcaccgagggcaccacggtctgcgacttcgacgaggcggagatccggcaacagcgctcggtgggccttgcggtcgcctcgctggcttacgacggcatcaaggtcaacctcgtcgacacccctgggtacgccgacttcgtgggtgagctgcgggccgggttgcgggccgccgattgcgcactgttcgtgatcgcggccaacgagggcgtcgacgaaccgaccaagtccctgtggcaggaatgcagccaggtcggcatgccccgcgcggtggtcatcaccaagctggaccacgcccgggcgaactaccgggaagcgctgaccgcggcacaagacgccttcggcgacaaggtcttaccgctctacctgccgtccggtgacggcctgatcggattgctttcgcaggcactgtacgagtacgccgacggcaagcgaacgacacgaaccccggccgagtcggacaccgagcgaatcgaggaggcgcgcggcgccttgatcgaaggaatcatcgaggaatccgaggatgagtccttgatggagcgctacctcggcggcgagacgatcgacgagtcggtgctgatccaggatctggagaaagccgtcgcccgaggctcgttcttcccggtgattccggtgtgcagcagcaccggggtcggcacactggaattgcttgaggtagccacccgcggatttccgtctccgatggagcacccactgccggaggtctttaccccgcagggtgtcccgcatgcggagctggcctgtgacaatgacgcgccgttgctcgccgaggtggtgaagacgacgtcggacccctacgtcggccgggtcagcttggtgcgggtgttctccggaaccatcaggcccgacacgacggtccatgtgtcgggccatttctcatcgtttttcggcggcggaactagtaacacgcaccccgaccacgacgaagacgagcgcatcggagtcttgtcgttcccgctgggcaagcaacagcgcccggcagcagccgtggtcgcgggcgacatctgcgccatcggcaagctgagccgggccgagaccggggacacactctcggataaggccgagcccctggtgctgaaaccctggaccatgcccgagccgctgctgccgatcgccattgcggcgcatgccaagaccgacgaagacaagctgtcggtcgggttgggccggttggccgccgaagacccgacactgcggatcgagcaaaatcaagagacccatcaggtcgtgctgtggtgtatgggcgaggcccatgccggcgtcgtcctggatacactggccaaccggtacggcgtcagcgtagacacgatcgagctgcgggtgccgctgcgggaaaccttcgccggcaatgcgaaaggccatggccgccacatcaaacagtccggtggtcacggtcagtacggggtgtgcgacatcgaggtggagccgctgccggagggctccgggttcgagttcctcgacaaagtggttggcggggcggtgccgcggcagtttatccccaatgtggagaaaggtgtccgcgcacagatggataagggagtgcacgccggctacccggtggtcgatatccgggtcacgttgctcgacggcaaagcccacagcgtcgactcttccgatttcgccttccaaatggccggcgcgctcgcattgcgggaggccgcggccgcgacgaaggtgatcttgctcgagccaatcgatgagatttcggtgctggtacccgacgatttcgtcggcgcggtgttgggcgacctgtccagtcgtcgtggccgagtgctcggcaccgagaccgcggggcacgaccgcacggtgatcaaggccgaggtgcctcaggtcgagctgacccgctacgcaatcgatttgcgctcgctggcgcatggggccgcatccttcacccgttcgtttgcccgctacgaaccgatgccggaatccgccgccgcccgggtaaaggccggggccggctag

SEQ ID NO: 19 - DNA, 1344 bp, Mycobacterium Tuberculosis
atgccggtgcgacgccgcgccggggaacggttgccgacggtgtgggacttcgaaaccgacccgcaataccagtccaagctggattgggtcgaaaaattcatggccgaggaactcgaaccgctcgatctggtcgccctcgatccttacgacaaaaagaacgccgacacgatggcgatcctgcggccgctgcagcggcaggtgaaagaccaggggttgtgggccgcgcatttgcgtcccgaactcggcggacagggcttcggtcaggtcaagctggcgctgctcaacgagatcatcggccgctcccggtgggcgccgtcggcgttcggctgtcaggcgccggactccggcaacgccgagatcctggcgctgttcggcaccgacgagcagaaagcccgctatctacgaccgctgctcgacggcgagatcacctcctgctattcgatgaccgagccgcagggtggttccgatcccgggctgttcgtgaccgcggcgacccgcgatgccgcgggaaacggggactggatcatcaacggcgagaagtggttttccaccaacgccaagcatgcgtcgttctttatcgtcatggccgtcaccaagccggaagcccgtacgtacgagaagatgtcgctgttcatcgtcccggccgacaccccgggcatcgagatcgtgcgcaacgtcggtgtgggagccgagtccacccggcacgccagccacggctacatccgctaccacgacgtccgggtgccggccgatcatgtgctcggcggcgagggccaagcgttcatgatcgcgcagacccgattgggcggcggccgaatacatcacgcgatgcggacaatcgcgctggcgcgcagagcattcgacatgatgtgcgagcgtgccctgtcgcgccagactagacacgggcggctcgccgatctgcagatgacccaggagaagatcgccgatagttggatccagatcgagcagttccggctgctggtactgcgcaccgcgtggcttatcgacaaacaccacgactatcaaaaggtgcgccgcgacatcgcggcggtcaaggtggcgatgccccaggtgctgcatgacgtcgtgcagcgggccatgcacctgcacggcgcgctcggggtctccgacgagatgccgttcgtcaagatgatgctggcagccgagtcactgggcatcgccgacggcgccactgagctgcacaagatgaccgtcgcccgccgtacgctgcgcgaataccagccggtgacaacgcttttcccgtcacagcacattccgacccggcgcgcgcacgccgaggcctggctggcccaacgcctcgagcacgcgatcgccgaattctga

SEQ ID NO: 20 - DNA, 606 bp, Mycobacterium Tuberculosis
gtgacagcagtcgccgccggcgcgttggtcgtcgagaccgactcgtttcggctacggttgctcgacggcctggtcgcctcgatcggtgagcggggttatcgcgccaccaccgtctccgacatcgtccggcacgcccgcacatccaagcgcacgttctacgaccggttcaccagcaaggaacagtgctttttggaactcctgctagcggacaacgagacgttgggcaacagcatccgggcggccgtcgatccaaacgccgactggcacgaccagattcgtcaggcggtcgaggcctacgtcacccatatcgaatccaggccggcggtgacgttgagttggatccgtgaattcccgtcgctcggtgccgccgcttaccccgtccagcgccgcggcatggagcagctaaccagcctgctgatcgagctcagcgccagccctgggttccggcgggctaacctaccgccactgaatgtgccactggccgtaatcttgctgggcggtttgcgtgaactgaccgcgctgaccgtcgaggacggccagccgatccggaacatcgtcgagccggcggtggatgcgtcaatcgcgctgctcggtccccgcagctag

SEQ ID NO: 21 - DNA, 1326 bp, Mycobacterium Tuberculosis
atgagcgaagtcgtcaccgccgcaccggcaccgcccgtagtccgacttcccccggcggtccgcgggccgaagttgttccagggattggccttcgtggtgtcacggcgacggctgctggggcggttcgtgcgtcgctacggcaaggccttcaccgccaatatcctgatgtacggccgggtcgtggtggtcgccgacccgcagctagccaggcaggtcttcaccagcagtcctgaggagctgggcaacatccagcccaacctgagtcggatgttcggttccggctcggtgttcgcgctggacggcgacgaccaccggcggcggcgccggctactggcgccgcctttccacggcaagagcatgaagaactacgagaccatcatcgaagaggagaccctgcgcgagaccgccaattggccgcaaggacaggctttcgcaacgctgccgtcaatgatgcatatcacgctcaacgccatcctgcgtgcgatcttcggggccggcggcagtgaactagacgagctgcgccgcctcattccgccgtgggtcacgctgggctcgcgcctggcggcgctaccgaaacccaaacgcgactatggccgccttagcccgtggggccggctggccgagtggcggcgccagtacgacactgtcatcgacaagctcatcgaagccgagcgggccgacccgaacttcgccgatcggaccgacgtattggcgttgatgctgcgcagcacttacgacgacggttccatcatgtcgcgcaaggacattggcgacgagctgctcacgctgctggccgccgggcacgaaaccacggcggcgacactgggctgggcgttcgagcggctcagccggcaccccgacgtgctcgcggctctggtcgaggaggtcgacaacggcggtcacgagctgcgtcaagcggcgatcctggaggtacagcgggccaggaccgtcatcgattttgcggctcgtcgcgtcaatccacccgtttaccagctcggcgagtgggtgattccccgcgggtattcgatcattatcaatatcgcccagatacatggcgatcccgacgtcttcccgcagccggatcgcttcgacccgcagcgctacatcggaagtaagccatccccgtttgcgtggatcccttttggtggcgggacccgccgctgtgtcggggccgcattcgccaacatggagatggatgtggtgctgcgaacggtgctgcgccacttcaccctcgagaccaccacggccgcgggcgagcgcagccacggtcgaggagttgcattcaccccgaaggatggcggtcgggtggtgatgcgccgacgctga

SEQ ID NO: 22 - DNA, 954 bp, Mycobacterium Tuberculosis
gtgaccgaactcgacgacgtgtcctcgttaccatcctcgcgacggaccgctggcgatacctgggcgatcaccgaaagcgttggcgccaccgcgttgggggtcgcggcggcacgtgccgtggaaacggccgcgaccaatccgctgatccgtgacgagttcgccaaggtgttggtgtcgtcggcgggtaccgcctgggcacggctggccgacgccgatttggcctggctcgacggtgatcagctcggccgacgcgtgcatcgggttgcctgcgactaccaggcggtgcgcacccacttcttcgacgagtacttcggtgccgccgtcgacgcaggtgtccggcaggtggtgatcctcgctgccggactggacgctcgggcctaccgcctgaactggccggcgggcactgtggtttacgagatcgaccagccttcggtgttggagtacaaggcggggattcttcaatcgcatggcgcggttccaacggcgagacggcatgccgtcgcggtggacctgcgcgacgactggccggccgcgctgatagctgccggattcgatggcacccaaccgactgcctggctagccgagggcttgctaccctacctgcccggcgacgccgcggaccggctattcgacatggtcaccgcgctcagcgcaccgggcagccaggtcgctgtcgaggctttcaccatgaacacaaagggcaacacgcagcgctggaatcggatgcgcgagcgactcggtttagacatcgatgtccaggcgttgacctaccacgagcccgaccggtcggatgccgcgcaatggctggccacgcatggctggcaggtgcacagcgtgagcaatcgcgaggagatggcccgactgggccgggcgatcccgcaagacctggtcgacgagaccgtccgcaccacgttgctgcgagggcgtctggtcacacccgctcaaccggcgtga

SEQ ID NO: 23 - DNA, 1152 bp, Mycobacterium Tuberculosis
gtgccggcagtgcagccatggttgtattccaacatgcctgccatccggggcgcggtgctagaccagatcggtgtgccgcggccctattggcggtcgaaaccaatcagcgtcgtcgagctgcacctggacccgcccgaccgcggtgaggtccttgtccgaatcgaggctgcgggcgtgtgccactccgacctgtcggtggtcgacggcacccgggtacggccggtgccgatcttgctcggtcatgaagccgctggaatcgtcgagcaggtcggcgacggcgtcgacggggtcgcggtcggtcagcgagtcgtgctggtgttccttccgcgttgcggccagtgcgcggcgtgcgcgaccgacggtcggacgccgtgcgaaccgggcagcgcggccaacaaggccggcacactgctcggtggcggtatccggctcagccggggcggccgcccggtgtaccaccacctcggcgtctcgggtttcgcgacccatgtcgtcgtcaaccgggccagcgtggttccggtgccgcacgaggtgccgcccaccgtcgctgccctactcgggtgcgcggtgctcaccggtgggggtgcggtactcaacgtcggtgatccgcagcccggccagtcggtcgccgtcgtcggcctcgggggcgtcggtatggcagcggtgctcaccgctttgacgtatacagacgttcgtgtggtcgccgtcgatcagctacccgaaaagctgtcggccgcaaaggccttgggcgcccatgagatctacacaccgcagcaggccacggccggcggggtcaaagccgccgtggttgtcgaagccgtcggtcatcctgccgcgctgcacaccgcgatcgggcttaccgcgcccggagggcgcaccatcaccgtcgggttgccgccaccggatgtccggatcagcttgtcgccgttggattttgtcaccgaaggccggtcactgatcggcagctatctgggttcggcggtgcccagccacgacattccccgcttcgtgtcgttgtggcaatcgggccgtctgccggtggagtcgctggtgacgtcaacgattcggttggacgatatcaacgaggcgatggaccacctcgccgatggcatcgcggtgcgtcagctcatcagtttcaccggtgatctctaa

SEQ ID NO: 24 - DNA, 456 bp, Mycobacterium Tuberculosis
atggctgcactgccggcaccggagaagctcctgcgcagcgactttccggtgctgtggccggtgggaactcgatgggccgacaacgacatgttcggccacctcaacaacgccgtctactaccagctgtttgacaccgcgataaacgcctggatcaacacgagcaccggggttgacccgctcgcgatgcctgtgctgggcattgtcgcggagtcgggctgccgttatttctcggaactgcgtttcccggagagcctaatggtgggcctggctgtgacgcggttggggcgcagcagcgtcacctaccggctgggtgtgtttaaggagcctgacgatgcgggggtgatcaccgcactcgggcactgggtgcacgtctatgtcgatcggactagccgcaggccggttccgattcccgaggccattcggtcgctgttgtcgacggcttgcgtaagcggataa

SEQ ID NO: 25 - DNA, 795 bp, Mycobacterium Tuberculosis
ttgataaagcatgatgttgtctgggtcacactatggcctgagcggcccaacaacaagcccccgccaagcccccggcaagtccccggcaatcccggcccgaccctgaaagtcctggcaagccacgtgaacgcacctctatcggcgaagccgcggagccagcttcccctgcgccgggcacagttgtccgacgaggtcgcgggccacctgcgggccgccatcatgtcgggcgccctgcgctctggaacgttcatccgtctcgacgagacggcagccgagctcggagtcagcgtcacgccggtgcgggaggcgctgctgaaactgcgcggtgaggggatggtcgggctggagccacatcgcggccacgtggtgctgccgttgacccgccaagacatcgacgacattttctggctgcaggccaccattgcccaagaacttgccacatcggccaccgctcacatcaccgacgttgagatcgacgagctggaccgcatcaacaatgcgctggccggtgctatcgggtccggtgatgccaaaaccatcgcgtcgatcgagttcgcgttccaccgcgtcttcaacaaagcgagccgccggatcaagttggcctggttcctgcttaatgccgcgcgctatatgggcgcaggtgttcgcggccgacccgcgatggggcgcggacgcggtgaacagtcatcggcagctgatcgccgcgctgcgccgccgcgacacagccgccgtaatcgagcacaccgtctggcagttcaccgatggggcacgcaggctgacggaggccctggctga

SEQ ID NO: 26 - DNA, 1548 bp, Mycobacterium Tuberculosis
atgagaacgctggaaccacccaaccgaatgcgaattgggctcatgggcatcgtcgttgcgctgctcgttgtcgctgtgggccaaagctttaccagtgttcccatgctattcgcaaagccgagctactacggccagttcaccgactccggcggactgcacaagggcgacagggtacgcatcgccggcttgggagtgggcaccgtggaggggctcaagatcgacggcgaccacatcgtggtcaagttctccatcggcaccaacaccatcggcaccgagagccgcctagccatccgcaccgacaccatcctgggtaggaaagtgctcgagatcgagccgcgcggcgcccaagcgttgccgcccgggggcgttttgccggttgggcaaagcaccaccccgtaccagatttacgacgcgttcttcgacgtcaccaaggccgcatccggctgggacatcgagacggtcaagcggtcgctgaatgtgttgtcggagaccgttgatcagacctatccgcacctgagcgccgccctcgacggggtggctaagttctccgacaccatcggcaagcgcgacgagcagatcacgcacctactagcccaggccaaccaggtggccagcatcctgggtgatcgcagtgagcaggtcgaccgcctattggtcaacgctaagaccctgatcgccgcgttcaacgagcgcggccgcgcggtcgacgccctgctggggaacatctccgctttctcggcccaggtgcaaaaccttatcaacgacaacccgaacctgaaccatgtgctcgagcagctgcgcatcctcaccgacctgttggtcgaccgcaaggaggatttggctgaaaccctgacgatcttgggcagattcagcgcgtcgttcggtgagacgtttgcctctgggccctacttcaaagtgctgctggccaacctggtgccgggtcagatcttgcagccgtttgtcgatgcggcattcaagaagcgtggtattagcccggaggacttctggcgcagcgccgggctgccggcataccggtggcccgaccccaatggcacccggttccccaacggtgcgccgccgccaccaccgccggtgttggagggcacgcccgagcatcccgggccggcggtgccgccgggatcgccgtgctcctacaccccgccggcggacggtctgccgcggccgtgggatccgctgccctgcgctaacctcactcaaggtccattcggtggccccgatttcccggcgccgctggatgtcgcgacgtcgccgccgaacccagacggtccaccgcccgccccgggcctaccaatcgcgggacgtccgggtgaggtgccgccgaacgttcccggcacgccggtgccgattccacaggaggctccccccggggcacgcacgctgcccctcgggccggcgcctggtccggctccgcccccggcggcgccaggcccgccggcaccaccgggccccgggccgcagttgccggccccgttcatcaaccccggcggcaccggcggtagtggcgtgacgggaggtagcgagaattga

SEQ ID NO: 27 - DNA, 1548 bp, Mycobacterium Tuberculosis
gtgctgactcgcttcatccgacgccagttgatcctttttgcgatcgtctccgtagtcgcaatcgtcgtattgggctggtactacctgcgaattccgagtctggtgggtatcgggcagtacaccttgaaggccgacttgcccgcatcgggtggcctgtatccgacggccaatgtgacctaccgcggtatcaccattggcaaggttactgccgtcgagcccaccgaccagggcgcacgagtgacgatgagcatcgccagcaactacaaaatccccgtcgatgcctcggcgaacgtgcattcggtgtcagcggtgggcgagcagtacatcgacctggtgtccaccggtgctccgggtaaatacttctcctccggacagaccatcaccaagggcaccgttcccagtgagatcgggccggcgctggacaattccaatcgcgggttggccgcattgcccacggagaagatcggcttgctgctcgacgagaccgcgcaagcggtgggtgggctgggacccgcgttgcaacggttggtcgattccactcaagcgatcgtcggtgacttcaaaaccaacattggcgacgtcaacgacatcatcgagaactccgggccgattttggacagccaggtcaacacgggtgatcagatcgagcgctgggcgcgcaaattgaacaatctggccgcacagaccgcgaccagggatcagaacgtgcgaagcatcctgtcccaggcggcccccaccgccgatgaggttaacgcggtattcagcggtgttcgcgattcgctgccacagaccctggccaatcttgaggttgtgttcgatatgctcaagcgctaccacgccggcgtggagcaattgttggtgttcctcccacagggtgccgcgatcgcacagaccgtactcacgccaactccgggtgctgcccagctgccgctcgcgccggcgatcaactatccgccgccgtgcttgacgggttttcttcctgcatcggagtggcggtctccggccgataccagtcccaggccgttgccgtcgggaacctattgcaagattccccaggatgcccagctgcaagtccggggggcgcgcaacattccctgtgtcgatgtcctgggcaaacgagcggcgacgccgaaggagtgccgcagtaaggacccgtacgttccgctgggtaccaacccgtggtttggtgatccgaaccagattctcacctgcccggcacctggagcgcgctgcgatcagccggtgaagcccgggttggtgattccggcgccctcgatcaacaccggtttgaatccggcgcccgccgatcaggtgcaaggaacgcccccgccggtcagtgacccgttgcaaagaccgggttcgggtactgtgcagtgcaacgggcagcagcctaacccgtgcgtctacactccaacatcgggcccgtcggcggtctatagcccggccagcggtgaactggtggggccggatggtgtcaagtacgccgtcgcaaactcgagcacaacaggagacgacggatggaaggagatgctggcgccggccagctga

SEQ ID NO: 28 - DNA, 735 bp, Mycobacterium Tuberculosis
gtggaagatcagcagtctgcttccggtgatctgacccaaaagtccgttgccaacggagagtccaccgacacggcatccgcagccaccgagggccaccggggcgagatcgacgccgcgggagagccggacgaacgcggtgccgccgtggctgacagccaagctgacgaggatgattcggccgcgacggctgccaggggcggcaagacacgggcaagacgatcgcgtggcaggcggttagcgatcacggtcggcgtggccgctgcgttgttcgtgggctcggcagcgttcgctggtgcgacggtggagccctacctctccgagcgcgccgtggtggccaccaagctcatggtcgcgcggaccgccgccaatgcgatcacgacgttgtggacctacacgccggagaacatggacaccctggccgatcgggccgcgaattacctcagcggtgatttcgcggctcagtaccgcagattcgtcgaccagatcgccgcagcaaacaaacaggccaagattaccaacgataccgaggtcaccggtgctgccgtggaatcgctgagcggccgggatgccgttgccatcgtctacaccaacaccacgaccaccagtccggtgaccaagaacatcccagcattgaagtatctgtcctaccggctgttcatgaagcgttatgacgcgcggtggctggtgaccaggatgacgaccatcacctcgctggatttgacgccgcaggtgtag

SEQ ID NO: 29 - DNA, 2076 bp, Mycobacterium Tuberculosis
atgaccgacgacgagcgattctcactgttggtcggcctgaccggggccagcgatctgtggccggtgcgcgatgaacgcatcccacagggcgtgccgatgtgtgccgggtatgtgccggggattccccggctcggggtcccggccttgttgatgagcgatgccggtctgggcgtcaccaaccctggctaccgccccggtgacaccgctacggcgctgcccgccggccttgccctagcggccagctttaacccggtgctggcccggtcctcgggcaaagcgatcggccgggaggcgcgcagtcgcgggttcaacgtgcaactggccggcgcaatcaatctggcgcgcgacccgcgtaacggccgcaacttcgagtacctttccgaggacccgttgttgagtgccacgatggccgcggagtcgatcatcgggattcagcagcagggtgtcattgcgacgacgaaacacttctcgctgaactgcaacgaaaccaatcggcactggctggacgcggtcatcgatcccgacgcgcaccgcgagtcggacttgttggcgttcgagatcgtcatcgagcggtcgcagcccggcgccgtgatggcggcgtacaacaaggtcaacggagattacgctgccggcaacgaccacttgctcaacgacgtgctgaaaggtgcttggggataccgcggttgggtgatgtcggattggggcggaacacccagctgggagtgcgcgctggccggcctggaccaagagtgcggtgcgcagatcgatgcagtgctgtggcagtcggaagcattcaccgaccgcctgcgtgccgcctacgccgacggcaatctacccaaggggcgcctgtcggacatggtacggcggatcctgcggtcgatgtttgccgtcggaatcgaccgatggaaaccagcgccggcgccggacatgaatgcgcacaacgagattgccgcacagatggcgcggcaaggaatcgtgctgctgcaaaaccgagggctgctgccgctcgctcccgaatcggccgggcgtattgccgtcatcggcggctatgcacacctcggtgtgccagccggttacggttcgagcgccgtcaccccgccggggggctatgcgggcgtgataccgatcggtgggtctggcttggcagccgggttgcgtaatctctacctgctgccgtcaagcccgctgagtgagttgcgaaagcggttgcccaacgcgcagttcgagttcgatcctggcatcaacccggcggaggcggtgctggctgcgcggcgagcagacatcgcgatcgtgttcgcgatccgtgccgaaggagagggcttcgacagcgccgatctgtcgctgccatggggtcaggatgcgctgatcgccgcagtcgcgtccgccaacgcgaataccgttgtggtgcttgagacgggcaacccggtgaccatgccctggcgcgactcggtgaacgccatcatgcaggcctggtatccgggccaggcgggtggccaggccgttgcggagattgtgaccgggcaggtgaatccttcgggccggctgccgatcaccttcccggtcgatctcggtcagacgccacgctcgcaaccgcccgagctcggtgccccgtgggggacatcgaccacgatccactacaccgagggcgccgatgttggttaccgctggtttgccagcacaaatcagaccccgatgttcgcgttcggtcacggcttgtcctataccagtttcgagtatcgtgacctggtggtgacgggcggccacaccgtgcacgccagtttcagcgttaccaacacgggcgaccgcagcggggcggatgtcccgcagctgtatatgatcgcagctcccggcgaatcgcggttgcggttgctgggattcgagcgggtcgagctcgaacccggccagactcggcgggtaaggatcgaggcggacccgcgactgctcgcccgctacgacggcgaggccagaagctggcgcatcgagccgggcggttacacggtggcggtgggcgcttcggcggtagcgctgaagctggcagccaaggtcaagctggccggccgtgggttcgggcggtga

SEQ ID NO: 30 - DNA, 663 bp, Mycobacterium Tuberculosis
ttgggcatggaccagcaacccaacccgcccgacgtcgacgcatttttggacagcacactggtcggcgacgatccggcgttagccgcggcattggcggccagcgacgcggccgagttaccccgcatcgcggtgtcggcacagcagggcaagttcctgtgcctgctggccggtgccatccaggcgcgccgcgtcctcgagatcggcacactcggtggcttcagcaccatttggctggcgcgtggcgcgggcccacagggacgggtggtcacgctggaataccagcccaagcacgctgaggtcgcccgggtgaacctgcagcgagcgggcgtcgccgatcgggtggaggtggtcgtcggtccggcgctggacacgttgccgacgttggccggtggcccgttcgacctggtgttcatcgacgccgacaaagagaacaacgtcgcatatattcagtgggcgatccggttggcccggcgcggcgcagtgatcgtggtggacaacgttattcgtggcggcgggattcttgctgagtccgacgatgccgacgcagtggcggcacgtcggacgctgcaaatgatgggtgagcaccccggcctagacgccacggcgatccagaccgtcgggcgcaagggctgggacggtttcgccctcgctttggtgcggtag

SEQ ID NO: 31 - DNA, 1242 bp, Mycobacterium Tuberculosis
atgactgccccaaccggaacctccgccactacgacgcgaccgtggacgccacggatcgccacgcaactgtccgtgctggcttgcgcggcctttatctatgtcaccgccgaaatcctgccagtgggcgcgctgtcggcgatagcgcggaacttgcgcgtcagcgtggtcctagttgggaccttgctgtcctggtatgcccttgtcgcggccgtgacaacggttccgctggtgcgttggaccgcacactggccgcgccgccgggccctggtggtcagcctggtctgcctgaccgtctcgcaactcgtctcggcgctggcgcccaacttcgcggtgctggccgccgggcgggtgctctgcgcggtcacccatggcctgctgtgggcggtcatcgcgccgatcgccacccggctggtgccgcccagtcacgccgggcgcgccacgacgtcgatctacatcggaaccagtctggcgctggtcgtcggtagcccactcacggctgccatgagcctgatgtggggttggcggctggcggcggtgtgcgtgaccggcgcggcggccgcggtcgccctggccgcccggctggcgttgccggagatggtgctgcgcgccgaccagctcgagcacgttggccgacgggctcgtcaccaccgtaatcctcgcctggtcaaggtcagtgtgctcacgatgatcgcggtaaccggccatttcgtgtcctacacctacatcgtggtgatcatccgcgacgtcgtcggtgtacgtgggccgaatctggcctggctgctcgccgcctatggggtcgccggcctggtgtccgtgcccctggtggcgcggccgttggaccgttggcccaagggcgccgtcatcgtcggtatgaccggactgacggcggcgttcaccttgctgaccgcgctggcattcggtgaacgccacaccgcggcgacggcactgctgggcaccggtgcgattgtgctgtggggagccttggccactgccgtgtcaccgatgctgcaatcggcggcgatgcgtagcggcggcgacgaccccgacggggcctcaggtttgtatgtgacggcgtttcagatcggcatcatggccggcgctctgctgggtgggctgctctacgagcgcagcttggcgatgatgctgaccgcgtcggcgggtttgatgggtgttgcgttgttcgggatgacggttagccagcacttgttcgagaatccgactctgagtcccggcgacggctaa

SEQ ID NO: 32 - DNA, 1992 bp, Mycobacterium Tuberculosis
gtgacacttgccatcccctcgggtatcgacctgagccacatcgacgctgatgcccgaccccaagacgacctgttcggccacgttaacggccgctggctggctgaacacgagataccagcggaccgagcgaccgacggcgccttccgtagcctgttcgaccgcgccgagacacaagtgcgagacctgatcatccaggccagccaagcaggtgctgcggtaggcaccgatgcgcagcgcatcggcgacctctacgccagcttcctcgacgaggaagccgtcgagcgcgcaggggtgcaaccgctgcacgacgaattggccacgattgacagcgcggccgacgccaccgaattggccgccgcccttggcactctgcaacgtgccggcgtgggcggcggcatcggagtctatgtcgataccgattccaaagactcgacccgttacttggtgcatttcacccaatccggcatcggattacccgacgagtcctactaccgtgacgagcaacacgccgccgtgctagcggcctacccggggcacatcgcccggatgttcggcctggtgtacgggggcgagagccgtgaccatgccaaaaccgcggaccgcatcgtcgcgctggagaccaaactcgccgacgcgcattgggatgtggtgaagcgccgcgacgccgaccttggctacaacctgcgcacgtttgcccagctgcagaccgaaggggcgggtttcgactgggtcagctgggtgaccgcattggggagcgctccggacgccatgacggaactggttgtgcgccaacctgattacctcgtcacctttgcctcgctgtgggcgagcgttaacgttgaagactggaaatgctgggcgcgttggcgtttgatccgcgcccgggccccctggctgacccgcgccctggtcgccgaggacttcgaattctacggccgcacgcttaccggcgcacagcagcttcgggaccgttggaagcgtggggtgtcactggtggagaacctgatgggcgatgccgtcggaaagctctatgtacaacgccatttcccgccggatgccaagtcccgcatcgacaccctggtggacaacctgcaggaggcgtatcggatcagcatcagcgagctggattggatgacgccgcagacccggcaacgcgcgctagcgaagctgaacaagttcaccgccaaagtcggctatccgatcaagtggcgcgactactcgaagctggcgatcgaccgcgacgacctctacggtaacgtccagcgcggctacgccgtcaaccatgaccgcgagctagccaagcttttcggcccggtcgaccgcgacgagtggttcatgacaccacaaaccgtcaacgcctactacaacccggggatgaacgaaatcgtcttccccgcagcgattttacagccaccatttttcgatccgcaggccgacgaggccgccaactacggcgggatcggggcggtgatcgggcacgagatcgggcacggtttcgacgatcagggcgccaaatacgacggcgacggcaatctggtcgattggtggaccgacgacgatcgcaccgagttcgccgcccgcaccaaagcgttgatcgagcagtaccacgcttacacgccgcgcgatctcgtcgaccaccccggcccgcctcatgtgcaaggcgcgttcaccataggcgagaacatcggcgacctgggcgggctgtcgatcgccctgctggcttaccagctctcgctgaacggcaaccccgctccggttatcgacgggctgaccggcatgcaacgggtgttcttcggctgggcacaaatatggcgaaccaaatcgcgtgcagccgaagcaatccgccggttggcggtcgatccgcactccccgccggagttccggtgcaacggtgtggttcgcaacgtggacgctttttatcaggccttcgacgtcaccgaggatgacgcgctgtttctggacccgcagcgcagggtccggatctggaactag

SEQ ID NO: 33 - DNA, 411 bp, Mycobacterium Tuberculosis
atgaagacaggcaccgcgacgacgcggcgcaggctgttggcagtactgatcgccctcgcgttgccgggggccgccgttgcgctgctggccgaaccatcagcgaccggcgcgtcggacccgtgcgcggccagcgaagtggcgaggacggtcggttcggtcgccaagtcgatgggcgactacctggattcacacccagagaccaaccaggtgatgaccgcggtcttgcagcagcaggtagggccggggtcggtcgcatcgctgaaggcccatttcgaggcgaatcccaaggtcgcatcggatctgcacgcgctttcgcaaccgctgaccgatctttcgactcggtgctcgctgccgatcagcggcctgcaggcgatcggtttgatgcaggcggtgcagggcgcccgccggtag

SEQ ID NO: 34 - DNA, 1479 bp, Mycobacterium Tuberculosis
gtgatccgcgcggctagtgatgacccggccggggtggacgagctggtggcagcgatcgcgccggggcttgccgggctgggtttgccggtcatcaaccgccgcgaggtggtgctggtgaccggtccgtggctggccggggttagcggtgtgcgcgcggcactggccgaaaggctgccgcagcgtaggttcgtcgagacggcagagttgggacccggcgatgcgccggtggcggtggtgttcgttgtttccgcggcaaccgcgctgaccgaatccgattgcgtgttgctggacaccgccgcggagcacaccgatgcggtggtagctgtggtgtccaagatcgacgtgcaccgcggctggcgtgacgtgcttaccagtaaccgcgacaggctggccgcgcgcgcgtcccgctacgcccgggtgccctgggttggcgcggccgccgcacctgagctgggcgagccatacctggacgacttggtcgccgccatccagaaacagctcgccgatccggctgtcgcgcggcgaaacatgttgcgtgcgtgggaatcccggcttctgatggtcgcgcggcggttcgatggcgatgcacagagcgccggtcggcgggcacgggtcgacgcgttgcgccagcaacggcgcacggtcctgcggcaggggcgtcaatcgaagtctgaacacaccatcgcgctgcgcgcgcagatccagcacgctcgggtcaaattgtcctactttgcccgcaatcggtgttcgttgctgcgcgtcgagctgcaggagcacgtcgccggtctgtcccggaaggacatcgccaggttcgcggcatacacgcgcggccgggtccaggaggtggtcgccgaggtgggcgaaggtgccgtcgcgcaccttgccgacgtcgcgcagctgttgggtgtgccggtgcagccaccggtcctcgagaacctcccggcggtgctcccgacggttgtggccccgccactgacatcacgacgattggagatccggctgacaacactcttgggcgccgggttcgggctgggtatcgcgctgaccctgagcaggctggtggcgggtcttactcccggcctggctgcatcggggatggtggcgggtgtggcgatcggcctggcggtgaccgcctgggtggtgaatgcccgcgcgctgctgcacgaccgtgtcgtggtggaccgctggacgggtgaggtgacggcatcgctgcggtccgtggtggagcagctggtcgccactcgggtggtggctgtcgagacgctgctgagcaccgcgattagtgaacgcgacgacgccgagaacgcccgggtggccgatcaggtcagcatcattgacggcgaactgcgcgaacacgccgtcgctgcggcgcgggccgcggccctgcgtgaccgggagatgccggcggtgcgggccgcacttgaggcggtgcgtgcagaactcggcgagccgggtgcgcccacaacaggcctgttctga

SEQ ID NO: 35 - DNA, 1074 bp, Mycobacterium Tuberculosis
gtgcgcaacgagctcaacgacgacgaagcgatgctggtcgccaccgtgcgggcattcatcgaccgagacgtgaagccaaccgtccgtgaggtcgagcatgccaatagctacccggaggcgtggatcgagcagatgaaacacatcggcatctacggcctggcgatcgacgaacagtacggcgggtcgccggtgtcgatgccgtgctatgtgcaagtcacccaggagctggcacgcggctggatgagcctggccggcgcgatgggcgggcacaccgtcgtcgccaaattgctgaccctgtttggcaccgaggaacagcggcggacatatctgcccccgatggccagtggcgagctgcgggccaccatggcgctaaccgagcccggcggtggctcggatctgcagaacatgtcgaccacggcgttggccgacggccctgaaggctctgccgggttgttgatcaacggctgcaagacgtggatcagcaacgcccgccggtccggacttttcgcggtgctgtgcaagaccgacccgaacgccacaccgcggcaccaaggcatgtcgatcgtgctcgtcgaacccgggccgggactcacggtgtcgcgggacttgccgaagttgggttacaagggcgtcgaatcctgcgagctgtcgttcgacaacctccgggtgccggtctcggcgatcctgggcggagccatgggtcaaggcttttcgcagatgatgaagggacttgaaacgggtcgcatccaagtggccgcgcgggcgctgggcgtggcgacggcggcactcgaggactcgctggcctacgctcagcaacgggaaagctttggccgaccgatctggcagcatcaggcggtcggcaattacctggccgacatggcgaccaagctcacagcggcccgtcagctgacccgctatgccgccgagcggtacgacagcggccaacgctgcgatatggaggccgggatggccaagttgttcgcctccgaggtcgcgatggaaatcgccctaaacgccgtgcgtatccacggcggctacggctactcgaccgagtacgacgtggaacggcggtga

SEQ ID NO: 36 - DNA, 789 bp, Mycobacterium Tuberculosis
atgagcagcgaaagcgacgcagccaacaccgaacctgaggttctggtagaacagcgggatcggattttgatcatcacgatcaaccgcccgaaagccaagaacgcggtcaacgccgcagtcagccggggcttggccgatgcgatggatcagcttgacggcgatgccggcctgtcggtggcaatcctgaccggtgggggcggttcgttctgcgcgggcatggacctcaaggcgttcgcccggggcgagaatgtcgtcgtcgaaggtcgcggccttggctttaccgaacgtccgccgaccaagccgctcattgctgcggtggaaggctacgcgttggcgggtggcaccgagctggcgcttgctgccgacctgatcgtggcggccagggattcggcgttcgggattcctgaagtcaagcggggtctggttgccggcggcgggggattgctgcggttgccggagcgcatcccgtatgcgatagccatggagttggcgctgaccggtgacaacctaccggccgaacgcgcgcacgagctggggctcgtcaacgttttggccgagccggggaccgccctcgatgctgcgatcgcgttggcggagaagatcaccgccaatgggccgctggcggtggtggccaccaagcggattatcaccgagtcgcgtgggtggagtcccgacactatgttcgctgagcagatgaagatcctggtgccggtgttcacctccaacgacgcgaaggaaggtgcgatcgcgttcgccgagaggcgccggccccgttggacgggcacctag

SEQ ID NO: 37 - DNA, 1266 bp, Mycobacterium Tuberculosis
atgttgcggttcgccgcgtgcggcgctatcggactcggagccgccctactgatcgccgccctgctgctgtcgacctataccaccagcaggatcgctgagatcccactcgatatcgatgccacgttgatcagcgacggcactggaacggcactcgactcggcgtcgctagccaccgagcacatcgtggtcaaccaggacgtgccgctggtgtcccaacagcaagtcaccgtcgaatcgcccgccaacgccgacgtggtcacacttcaggtcggatcctcgctccggcgcaccgacaagcagaaggacagcgggctgctgctggcgatcgtcgacacggtcaccctcaaccgcaagacggcgatggctgtctccgacgacacccacaccggcggcgccgtccagaaaccgcggggcctcaatgacgagaacccgccgacggccattccgctgcggcacgacgggctgtcttaccggttcccgtttcacaccgagaagaagacatacccctatttcgaccccatcgcacagaaggcgtttgacgccaactacgaaggcgaggaggacgtcaacggtttaaccacataccgcttcacgcagaacgtcggctacacccccgaggggaagctggtggctcccctcaaatacccgtcgctgtacgccggcgacgaggacggcaaagtcaccacatcagcggcgatgtgggggctacccggtgatccgaacgagcaaatcaccatgacccgctattacgcggcgcagcgaacattctgggtggacccggtgtccggcaccatcgtcaaagaaaccgaacgcgccaaccactacttcgctcgtgacccactcaaaccagaggtcacgtttgccgactaccaggtcacctccaccgaagagacggtcgaatcccaggtcaacgcggctcgcgacgagcgcgaccggctggcgctgtggtcgcgggtgctgccgattacattcaccgcggccggcttggtcgcgctggtcggcggtggtctgttcgcgtcgtttagccttcggaccgaaggtgcgctgatggctgccagcggggatcgggacgaccacgattaccgccgcggcggcttcgaagaaccggtgcctggagcggaggctgagaccgagaaactgcccacgcagcgccccgacttcccgcgcgagccgagtggctcggatccgccccgactcggttcggcgcagccgcccccaccgccggacgcggggcatcccgaccccggcccgcccgagcggcgctaa

SEQ ID NO: 38 - DNA, 1536 bp, Mycobacterium Tuberculosis
atgcgatcggtgacatgttccgccacgctggtcctgcccgtgatagagcccaccccagccgataggaggccccgacacctcctgctcgggagcgctggccacgttagtggcaggctggacaccggacgatttgtgcaaacccacccagcaaaggatgtcagcgtgcccatcgccaccatcaacccggctaccggcgaaacagtcaagacattcactgcggcgaccgatgacgaagtcgacgcggcaatagcccgggcccaccggcggttcgccgactaccgccagaccagcttcgcccagcgcgcccggtgggccaatgccaccgccgacttgctggaagccgaggccgaccaggccgccgcgatgatgacgctcgagatgggcaagacgctggccgcggccaaagccgaggcactgaagtgcgccaagggttttcgctactacgccgaaaacgccgaggcgttgctggccgacgaacccgccgatgcggccaaggtcggggcgtcggcggcctacggccgataccagccgctcggggtgatcctggcggtgatgccatggaacttccccctgtggcaagcggttcggttcgccgcaccggcactgatggccggaaacgtcggcctgctcaagcacgcgtcgaacgtgccgcaatgcgcgctgtacctggccgacgtcatcgcccgaggcggcttcccggacggctgcttccagacgttgcttgttagctcgggagccgtcgaagccatcctgcgtgatccccgggtcgcggcggccacgctgaccggaagcgagccggccggccaatcggtgggcgctatcgccggtaacgagatcaagccgaccgtgctcgagctcggcggcagcgacccgttcatcgttatgccgtcggccgatctggacgccgcggtcagcaccgccgtcaccggccgggtgcagaacaacggccaatcctgcatcgccgccaagcggttcatcgtccacgccgacatttacgacgatttcgtcgacaagttcgtcgcgcggatggcggcgttacgggtcggcgacccgaccgacccggacaccgacgtgggcccgctggccaccgagcagggccgcaacgaggttgccaagcaagtcgaggatgctgccgcggcgggcgcggtgatccggtgcggcggaaagcgtctcgaccggccgggctggttctacccgccgaccgtgatcaccgacatctccaaggacatggctctctacaccgaggaggtcttcggtccggtcgcctcggtgttccgcgcggcgaacatcgacgaggccgtcgagatcgccaacgccaccaccttcgggctgggatccaacgcctggacccgcgacgagaccgagcaacgacgcttcatcgacgacatcgtggcgggccaggtttttatcaacggcatgacggtgtcctatcccgaattgccgttcggcggggtcaagcgctcgggctatggccgggaactgtccgcacacgggatacgcgagttctgcaacatcaagaccgtctggatcgcctag

SEQ ID NO: 39 - DNA, 1449 bp, Mycobacterium Tuberculosis
atgggatggttttcagcgcccgaatattggctgggcagactggcgctggagcgcggcacggcgattatttatctgatcgcattcgtcgcggccgcacagcagttccggcccctcatcggagagcacggcatgctgccggtgccgcggtatctggctggacagtccttctggcgaacaccgagcatctttcactttcgctattccgatcgggtgttcgccggggtctgctggttgggtgccgtgttgtcggcagccgtcgtcgccggtgcggcctccttcgtgccgttgtgggccacgatgctgatctggctgacgctgtgggtgctctacctgtccatcgtcaacgtcgggcaggcgtggtactcattcggttgggagtcgctgctgctggagaccggcttcctgatgatcttcctcggaaacgagcgcaccgccccgccgattctgacgttgttgttggcgcgctggctgctgttccgggtcgaattcggtgccggattgatcaagatgcgcggcgactcgtgctggcgcagtctgacgtgcctgtactaccaccacgaaacacagcccatgccgggcccgttgagctggttcttccatcacctgcctaagccattgcaccggattgaggtggcgggcaaccatttcgcccagctcgtggtgccgtttgggttgttcacaccacagcccgcagccagcatcgccgccgcgatcatcgtggttacccagctatggctggtggcatcgggaaatttctcctggctcaattggctgaccatcctcttggcgtgcagcgcgatcgacacatcttcggccgcggcgctgctgccgatgccggcccagccggcgctgtcggcaccgccgcagtggttcgccggcctcgtggtcgtattcaccgcggcggtgctgttgctgagctactggccggcacgcaatctgctgtcctctcatcaacgaatgaacatgtcgttcaacccctttcatttggtcaacacctacggggcgttcggcagcatctgccgcacccgccgggaagtggtaatcgaagggaccgacgagtcaccgattaccgaacaaaccgtctggaaagcatacgaattcaagggcaagcccggtgatccgcgccggctgccgcggcaatgggccccctaccatctgcggctggactggctcatgtggttcgccgccatctcaccgggctacgcactaccgtggatgacgccattcctaaaccggttgctgcgcaatgatcctgcgacgctgaagctgttgcgccacaatcctttcccgcaatctccgcctcggtatgtgcgcgcgcagctgtatcagtaccgcttcaccaccgtggccgagctgcgacgggaccgagcctggtggcaccgcacgctgatcgggcgctacgtcccgccgatgtcgctacgcaaagtcgcctcgccaccggccgattga

SEQ ID NO: 40 - DNA, 234 bp, Mycobacterium Tuberculosis
atgattcgaacgcaagtccagctcccagatgagctttaccgggacgccaagcgggtcgcgcacgagcacgaaatgacccttgccgaggtcgttcgtcgcgggctggagcacatggtgcggatctatccgaggcgcgatgcggcgtccgacacctggcagccgcccacgccgcgtcgactcggtccgtttcgtgcgtccgaagaaacgtggcgcgagctcgccaacgaggcgtga

SEQ ID NO: 41 - DNA, 843 bp, Mycobacterium Tuberculosis
gtgactcaacccagcggcctgaagaacctgctgcgcgcggcggccggggcgctacccgtggtgccccggacagaccagctgcccaaccggacggtgaccgtcgaggagctgccgatcgaccccgccaacgtcgcggcctacgcggcggtcaccggtctgcgctacggcaaccaggtgccgttgacctatccgttcgcgttgacttttccatcggtgatgtcgttggtgaccggcttcgacttcccgttcgccgcaatgggagcgatacacaccgagaaccacatcacgcaataccggccgatcgcggtcaccgacgcggtgggcgtgcgggtgcgcgcggagaatctgcgcgaacaccgcaggggcctgctggtcgatctggtgaccaacgtcagcgtcggcaacgatgtcgcctggcaccaggtgacgacgttcctgcatcaacaacgcaccagcttgtccggcgaacccaaaccgccgccgcaaaaaaagcccaagctacccccgcccgccgcggtcctgcggatcaccccggcgaagatccgccgctatgccgccgtcggcggcgatcacaacccgatccacaccaacccgatcgcggcgaaactgttcggcttccccaccgtcatcgcgcacgggatgttcactgccgcggcggtattggcgaatatcgaagcccgttttccggacgcggtgcgctattcggttcggttcgccaagccggtgctgctgccggccaccgcgggactctacgtcgccgaaggcgatggcggctgggatctcacgctgcgcaatatggccaagggatacccccacctgaccgctaccgtgcggggtctatag

SEQ ID NO: 42 - DNA, 1323 bp, Mycobacterium Tuberculosis
gtggcccctgctgctaagaacacttcacagaccaggcggcgagtcgccgtactgggcggcaaccgcatcccgttcgccagatcggacggtgcctacgcggatgcgtccaaccaggacatgttcaccgcggcgctgagcggcttggtggaccgattcggactcgccggcgagcggctggacatggtggtgggcggtgcggtgctcaaacacagccgcgacttcaatctaatgcgcgaatgcgtgctgggctccgaactctcgccgtacacgccggcgttcgacctgcagcaggcctgcgggacgggcctgcaggccgcgatcgcggccgccgacggcattgccgccgggcggtatgaggtggccgccgctggcggggtggacaccacctcggacccgccgatcggcctgggcgacgacctgcgccgcaccctgctcaagctgcgccgatctaggtccaacgtgcaacgcctcaagctggtgggcacgctgccggccagcctgggcgtggagatccccgccaacagcgagccgcgcaccgggctgtcgatgggcgagcacgccgccgtcaccgccaagcagatgggcatcaaacgcgtagaccaggacgagctggccgccgccagccatcgcaatatggccgacgcctacgaccggggtttcttcgacgacctggtcagtccgtttttagggctgtaccgagacgacaatctgcggcctaactccagcgtcgagaaactggccacgctgcgtccggtcttcggagtgaaggccggtgacgcgacgatgacggccggcaattcgactccgctgaccgacggcgcctcggtggcattgctggccagcgaacagtgggcggaggcacactcgctggctccgctggcctatctcgtggatgccgagaccgccgcggtcgactatgtcaacggcaacgacggcctgttgatggcgccgacctacgcggtaccccggctgctggcccgtaacgggttgagcctgcaggacttcgacttctacgaaatccacgaggcgtttgcctccgtggtgctcgcgcatctggcggcgtgggagtccgaggagtactgcaagcggcggctgggcctggacgccgcgctggggtcgatcgatcggtccaagctcaacgtcaacgggtcgtcgttggccgccgggcaccccttcgcggcgaccggtgggcggattttggcgcagaccgccaagcagctcgccgagaagaaggcggcgaaaaaaggcggcggaccgctgcgcgggctgatttcgatctgcgcggccggcggccaaggtgtggccgcgattttggaggcctga

SEQ ID NO: 43 - DNA, 1485 bp, Mycobacterium Tuberculosis
atgtcgggtctgctggtcgcgggtacgacaagcgacgccggtaagagcgccgtgaccgcggggctgtgccgcgcgttggcccgacgcggtgtgcgggtggcgccgtttaaggcgcagaacatgtccaacaactcgatggtctgccgaggccccgacggcacgggcgtggagatcggtcgggcgcaatgggtgcaggcactcgcggctaggaccacgcccgaggcggcgatgaacccggtcttgctcaagccggccagtgatcaccgcagccacgtggtgttgatgggcaagccctggggcgaggtggcgtcgtcaagctggtgtgcggggcggcgagcgctcgccgaggccgcatgccgcgccttcgacgccctcgccgcccgctacgacgtcgttgtcgcggagggcgccggcagcccggccgaaatcaacctgcgcgcaggtgactacgtcaacatggggcttgcccgtcatgcgggactgccgaccatcgtcgtcggtgacatcgaccgcggcggggtgttcgctgcgttcctgggcaccgtcgcgttgctggctgccgaggaccaggcgctggtcgcggggtttgtggtcaataagtttcggggcgactccgacctgctggcgccaggtctgcgcgacctggaacgggtcaccgggcgcagggtgtacggcaccctgccgtggcaccccgacctctggctggactccgaagatgccctcgacctacagggccggcgcgcggcgggcaccggggcccgccgggtagccgtcgtgcgcctgccacgaatcagcaacttcaccgatgtcgacgcattgggtcttgagcccgacttggatgtcgtgttcgcttccgacccccgcgcgctggacgatgccgatctgatcgtgttgccgggcacccgggcaacgatcgccgatctagcctggctgagggcgcgagacctagatcgtgcgctgctggtgcatgttgcggcgggcaagccgctgctcggcatttgtggcgggttccagatgctgggccgggtgattcgcgacccgtacggcatcgaaggtccgggagggcaggtgaccgaggtcgagggcttgggtttgctcgacgtggagaccgcattttccccccacaaggtgctgcggctaccgcgcggcgaaggactcggtgtgcccgcgtcggggtacgagattcaccacggccggatcacccgcggtgacaccgccgaggagttcctcggcggcgcgcgcgacggaccggtgttcggcaccatgtggcacggctcgttggaaggcgacgccctgcgcgaggccttcctgcgagagacgctcggcctcgccccgtcgggctcatgcttcctggccgcacgcgagcgccgcctcgacctgctcggcgatctcgtcgaacgacacctcgacgtcgatgcgctgctcaacctggcccgccatggttgcccgccgaccttgccctttctcgctccgggcgcgccatga

SEQ ID NO: 44 - DNA, 1671 bp, Mycobacterium Tuberculosis
atgaccgccccgatctggatggcttcgcccccagaggtgcactcggcgctgctaagcagcgggcctgggcccggtccgctgctggtgtcggccgaggggtggcactcgttgagcatcgcctacgcggagacggccgacgagctggccgcgctgttggccgccgtacaggccggcacctgggacggcccgaccgccgcggtttacgtggccgcccataccccttatctggcgtggctggtgcaggccagcgctaacagcgcggccatggccacccggcaagaaaccgcggccaccgcctacggcaccgccttggccgcgatgccaacgttggccgagctgggcgccaaccacgccctccacggcgtgctgatggcgacgaacttcttcggcatcaacaccatcccgatcgcgctcaacgagtccgactacgcgcggatgtggatccaggccgccaccacgatggccagctatcaagcggtctcgaccgcggcggtggccgccgcaccgcagaccaccccagccccccagatcgtgaaagccaacgcgccgacagcggcttccgacgagccgaaccaagtccaggaatggctgcaatggttgcagaagatcgggtataccgacttctacaacaacgttatacaaccgttcatcaactggctgaccaacctcccctttttgcaagcgatgttttccggatttgatccgtggctgccctcgctgggtaatccgctaaccttcctaagcccggccaacattgcgttcgcccttggctaccccatggacatcggatcttatgtcgccttcctgtcgcaaaccttcgcattcatcggggcggatctggcggcggcgttcgcgtcgggcaatcccgcaactatcgcttttaccctgatgttcaccacggtcgaagccattggcacgatcatcaccgataccatcgcgctggttaaaacgctgctcgagcaaactcttgcgttgctcccggcggcgctgcccctgctagccgccccgctggcgccgttgacccttgcccctgcgagtgcagcaggcggcttcgcgggcttgtctgggctggcgggcctggttggcatcccgccatccgcgccgcccgtcatcccgccggtcgcggcgattgccccgagtatcccgacccccaccccaactccagccccagccccggcccccacggccgtgaccgcgccgacgcccccgcccgggccgccaccgccgccggtgaccgccccgccgccggtgaccggagccggcatacaaagcttcgggtacctggtgggtgacctgaactcggcggcgcaggccaggaaggccgtcggcaccggcgttcgaaagaagacgccggaacccgacagcgccgaggccccagcggccgcggcggcgcccgaggaacaggttcaaccgcagcggcgtcggcggccaaagatcaaacagctcggccgcggttacgaatacctggatttagaccccgaaaccggccacgacccgacgggttcgcctcaaggagcgggaaccctgggtttcgccggaacaacccacaaggccagtcccggacaagtcgcaggactgatcacgttacccaacgacgcgttcggcggcagcccacgcacgccaatgatgcccggaacctgggacaccgactcagcgacccgggtggagtga

SEQ ID NO: 45 - DNA, 1392 bp, Mycobacterium Tuberculosis
atggcactcaccaccgccccggcaatcgattatgcgctgccacgccagcaggatgagggcgatcactggatcgacgactggcgcccggaagacccggtgttctgggagacgatcggcaggccgatcgcccgccgtaacctgatcttctccatcttcgccgagcacgtcggcttcagcgtgtggatgctgtggagcatcgtggttgtccagatgaccgccgccgctcccgggcaccccgccgcgtccggctgggcgctgtccgccagccaggccctatgtttggtcgccgtccccagcggtgtcggggcgttcctccggctgccgtacaccttcgcgatcccgatctttggtggccgcaactggacgaccgtctcggcggcgctgctggtgatcccgtgcctgctgctggcttgggcggtgagccacccttccctgccgttcgcggtgttggtggtgatcgcggccaccgccggtttcggtggcggcaactttgcctcatcgatggccaacatctcgttcttctacccggagaaggacaagggttgggcgctgggcctgaacgcggccggaggcaacatcggggtggcggtggtgcagaagatcattccgcccatcgtggtcgccggcagtggggtggcactgtcgcgtgccggactgttcttcgtgcccttggccgtcgccgccgcggtgtgcgcattcctgtttatgaacaacctcacggaggccaaggccgatgtgaagccggtgtggcagtcgctgcggcatgccgacacctggatcatgtcgctgctgtacatcggcacctttgggtcgttcatcgggtattcggcggccttcccgacgttgctcaagaccgtgtttggccgtggtgacatcgcgttgggttgggccttcctcggcgcgggcatcggttccctggtccgtccgctgggcggcaagctcgccgaccggatcggcggtgcgcggatcaccgcggccagtttcgtcatgctggcggccggggcggctgcggcgttgtggtcggtgcagtcggtcaatctgccggtgttcttcgtcagcttcatgttcttgttcgttgccaccggcatcggcaatggttcgagctaccggatgatctcgaggatcttccaggtcaaaggcgaagtcgccggcggggatccggaaacgatggtgaacatgcgccgacaggccgccggagcgctgggcatcatctcctcgatcggcgcgttcggcgggtttgtggtgccgctggcctacgcctggtcgaaggtgcacttcggcaatatcgaacccgccctgcacttctacgtggcgttcttccttgccctgctcgtcgtcacctggtactgctacctgcgtagaaccacccccatgggccaggtgggggtgtag

SEQ ID NO: 46 - DNA, 1194 bp, Mycobacterium Tuberculosis
atgagccgcatggccgccccggtgtcgctggacgtgcacggacgccaggtcatcgtcacgcatccgggcagggtcgtcttccccgctcacaacgatcgaaagggctacaccaagttcgatctggtccgctattacctcgccgtggccgagggggcgatgcgcggggtggccggccggccgatgattctcaagcgtttcgtcaagggcatctccgccgaggcggtgtttcagaagcgcgcaccggcaaaccggccagactgggtggacgtggccgagctgcactatgcgtcgggccgctccgccgcggaggcggtcattcacgacgccgccgggctggcgtgggtgatcaacctggggtgtgtggatctcaatccgcatccggtgctcgccggcgacctcgatcatcccgacgagctgcgggtggacttggacccgatgcccggggtcgcgtggcagcgggtcgtcgaggtcgcgttggtggtccgggaggtgctggaggattacgggttgaccgcatggccgaagacgtccgggtcgcggggctttcacgtctatgcccggatcgcgccttgctggtcgtttccccaggtgcgcctggccgcccagaccgttgcgcgtgaggtcgaacggcgcctacccgacgcggcaaccagtcgttggtggaaggaagaacgcgagggcgtgttcgtcgacttcaaccagaacgccaaggaccgcacggtcgcgtcggcctactcggtgcgggccaccccggatgcccgggtgtccacgccgctgcactgggaggaggtgcccggctgcgacccggcggtgttcaccatggccaccgtgcccagccggttggccgacatcggtgacccctgggccgggatggatgacgcggttggccggctcgaccggctgttgatgctggccgaggaactgggtccgccgcagaaggcgcaatccgccaagccgctgatcgagatcgcccgcgccaagacgcgggccgaggcgatggcggcgttggacatctggcgcgaccggtatcccggcgccgcggctttgctgcggcccgccgatgtgctggtcgacggcatgcgcgggccgagttcgatctggtatcggatccggatcaacctgcagcacgtcccggccgaccagcgcccgccgcaggaggagctgatcgccgactacagcccgtggccgcggtga

SEQ ID NO: 47 - DNA, 1683 bp, Mycobacterium Tuberculosis
atgcctaacctcactgatctgcccgggcaggccgtctccaagctccagaagtccatcggacagtacgtcgcgcgcggcactgccgagttgcattacctgcggaagatcatcgaatcgggcgcgatcgggctggagccgccgctgaactacgccgcgctcgcagccgatatccgcaagtggggggaagtcggcatgctgccgtcgcacaatgccaggcgcgcccccaaccgggcggccgtcatcgacgaagaaggcacgctcacgttttccgaactcgacgaggccgcacacgcggtggccaatggcctactggccaagggtgtccgcgccggggacggcgtcgccatcttggcgcgcaaccaccgctggtttgtcatcgccaactacggggcggcccgagtgggggcccgcatcatcttgctcaacagcgagttctccggcccgcagatcaaagaggtgtcggaccgtgagggcgccaaggtgatcatctacgacgacgagtacaccaaggccgtcagcttggcccagccaccgttgggcaagctgcgggcgcttggtgtcaatcccgacgacgacaagccgtcgggcagctccgacgaaacgttggccgagctgattgcgcacagcagcaccgcgcccgccccgaaggcgagccgccgtgcgtcgatcatcattttgaccagcggcaccaccggcaccccgaagggggcgaaccgtaacacaccgccgacgctggctccgatcggcggcattttgtcgcacgtgccgttcaaggccggcgaggtgacgctgttgccgtcgccgatgttccatgcgctgggttacatgcacgccgcgctcgccatgttcctgggctcgacgctggtgctgcggcggcggttcaagcccgcgttggtgctggaagacatcgaaaagcacaaggcgacatccatggtcgttgtaccagtgatgctgtcgcggatcctcgaccagctggagaaaaccgaacccaagcccgacttgtcgagcttgaagatcgtgttcgtatccggatcgcaattgggtgccgagctggccacccgcgcgctgggggacctcggcccggtcatctacaacatgtacggctcgaccgaggtcgcgttcgccaccatcgccggccccaaggatctgcagttcaaccccagcacggtggggcccgtcgtcaagggggtgacggttaagatcctcgacgagaacggcaatgaggtgccgcagggtgccgttggccggatctttgtgggcaatgccttcccgttcgagggttacaccggcggcggtggcaagcagatcatcgacggcctgttgtcgtccggcgacgtcggctacttcgacgagcgcggcctgctgtatgtgagcggccgcgacgacgagatgatcgtctctggtggtgagaacgtgtttcccgccgaagtcgaggatctgatcagcgggcatcccgacgtggtggaggccgccgcgatcggcgtcgacgataaggagttcggtgcccggctgcgcgcgttcgtggtcaagaagccgggagctgacctcgacgaggacaccatcaagcagtacgtacgcgatcatcttgcccgctacaaggtgccgcgggaggtgatcttcctcgacgagctaccgcgcaaccccaccggcaaggtcctcaaacgtgagctacgcaagctgtag

SEQ ID NO: 48 - DNA, 921 bp, Mycobacterium Tuberculosis
atggcgatttcgctggtggctcaccagcccatcccccacgtcgagcgtcccatggccgacccaccccgtctccagctggccaggcgccggcgatcggcggccggccccggcggtaacgaggacagcttgatgggagtggcgctgctagccggcccggccaacgtgatcatggagttggcgatgccgggtgtcggctacggcgtgttggagagccgtgtcgaaagcggccggctggaccgccatccgatcaagcgggcgcgcaccacctttacctacgttgcggtggccgttgccggcagcgacgaccagaaggcggcctttcgtcgcgcggtgaataaggttcacgcgcaggtgtattcgactccggagagcccggtgtcctaccacgcgttcgatcccgaactacagctgtgggtggcggcatgcctctataagggcggcgtcgacgtctaccgcaccttcgtcggcgagatggacgacgaagaggccgaccatcattaccgcgcgggcatggcgatgggcaccacgttgcaggtgccgccgcagatgtggccaccggatcgggcggccttcgaccgctactggcggcaatcactggacagggtgcacatcgatgacgtcgttcgcgactacctgtatccgatcgtggcgctccgaattcgcgggatcgcactgccgggtccgctgcggcggctgtcggagggtatcgcgctgctgatcaccaccggtttcctgccgcagcggtttcgcgacgagatgcggttgccgtgggacgcgaccaagcagcggcgctttgacgcgctcatggccgtgctgcgcacggtgaatcgcctgatgccgcggtttgtccgggagttcccgttcaacctgatgctctgggacctggaccggcggatgaggcgcgggcgcccgctggtgtaa

SEQ ID NO: 49 - DNA, 2874 bp, Mycobacterium Tuberculosis
atgtcgtttgtgattgcggcgccagaggttatcgcggcagcggcaacggatttggccagtctcggatcgagcatcagcgcggcaaacgcagccgcggcggccaacaccacggcactgatggccgcgggcgccgacgaggtgtcgacagccatcgccgcgctgttcggcgcccacggccaggcctatcaggcgctcagcgcccaagcgcaggcgtttcatgcccagttcgtgcaggcattgacctccggtggcggcgcctatgcggccgccgaggccgccgcggtgtcgccgctgctggatccgatcaacgagttcttcctggcgaataccgggcgcccgttgatcggcaacggcgccaacggcgcccccggcaccggggccaatggcggggacggcggctggttaatcggcaacggcggcgccggaggatccggcgcggccggcgtcaacggcggcgccggcggcaacggcggcgccggcggcaacggcggcgccggcgggctcatcggcaacggcggcgccggcggcgctggcggggtcgccagcagtgggatcggcgggtccggcggagccggcggcaacgccatgctgttcggcgccggcggcgccggcggcgccggcggcggcgtagtagccctcacgggcggggccggcggcgccggcggggctggcggcaacgccggcctgctcttcggcgccgccggagtcggcggggccggcggattcacgaacggcagtgcactcggcggggcgggcggcgccggcggggccggcgggctgttcgccaccggcggggtcggcggatccggtggggccggcagctccggcggggccggtggggccggtggcgctggcgggctgttcggcgccggcggcaccggcgggcatggcgggttcgccgacagcagcttcggcggagtcggcggggccggcggggccggcgggctgttcggcgcaggcggggaaggcggcagcggcggacacagcctggtcgccggcggggacggcggggccggcggcaatgccggcatgctcgccctcggcgccgcgggcggcgccggcggaatcggtggggacggcggtactctcacggccggcggcataggcggcgccggcggcgccggcggcaacgctgggctgctcttcggctccggcggctccggcggcgccggcggattcggcttcgccgacggcgggcaaggcggccccgggggcaacgccggcacggtcttcggctccggcggcgccggcggcaacggcggagttggccagggcttcgccggcgggatcggtggggctggcggcacccccgggctgatcggtaacggcggcaacggcggtaacggtggcgccagcgcggtgaccggcggcaacggcgggatcggcggcaccggcgtgttgatcggcaatggcggtaacggcggtagcggtgggattggcgcgggcaaggccggagtgggcggcgtcagcgggctgctgctcggtctagacggattcaatgctcccgcgagcacctcgccactgcacaccctgcagcaaaatgtgctcaatgtggtgaacgagcccttccagacgctcaccggccgcccgctgatcggcaacggcgccaacgggactcctggaaccggggctgacggcggggccggcgggtggctgttcggcaacggcgccaacgggaccccggggaccggggctgccggcggggccggcgggtggttgttcggcaacggcggtaacggcgggcacggtgcgaccaacaccgccgccacggctacgggcggggccggcggggccggcgggatcttgttcggtaccggtggcaatggcgggaccggcgggatagccaccggtgctggagggatcggcggggccggcggcgccggtggggtctccttgctgatcggctccggcggcaccggcggcaacggtgggaactccataggcgtcgctggcatcggcggggccggcgggcgcggcggcgacgccggtttgctcttcggcgcggccggcaccggcggccacggcgccgctggcggtgtcccggccggcgtcggcggcgccggcggcaacggcggactgttcgccaacggcggagccggaggggccggcgggttcaacgcagccggcgggaacggcgggaacggcggactgttcggaactggcggcaccggcggggccggcacgaacttcggggccggtgggaacggcgggaacggcggactgttcggagccggcggcaccggcggcgccgccggctcgggagggtccgggatcaccaccggcggcggcgggcacggcggcaacgccggcctactctccctcggcgcctccggtggcgccggcggcagcggtggcgccagctcccttgccggcggggccggcggaaccggcgggaacggcgccttactcttcggcttccgcggcgccggcggcgccggcgggcacggcggggcagcacttaccagcatccagcaaggcggcgccggcggcgccggcgggaacggcggcttgctcttcggctccgccggcgccggcggcgccggcggcagcggtgccaacgctctaggcgccggtaccggcggcaccggcggtgacggtggccacgccggggtgttcggcaacggcggtgacgggggttgccggcgggtttggcgccggtaccggcggcagcggtggtgtcggcggcaacgccgtgctgatcggcaacggcggcaacggcggcaacgccggcaaagccggggccacgcccggtgccggcggcaccggcgggctgctgctcggcgagaacggactcaacggcttgccatagcaggcagacctgcgaccacacgcggcgttgagggcatcagttgctcaccgcagatgatgccgtag

SEQ ID NO: 50 - DNA, 1611 bp, Mycobacterium Tuberculosis
atgacgctgtggatggcctcgccgcccgaggtgcattcggcgttgctcagcagcgggccggggccgggctcggtgttgtcggcggccggggtgtggtcgtcgctgagcgccgaatacgccgcggtcgccgacgagctcatagggctgctgggcgccgtgcagaccggcgcttggcaggggcccagcgccgcggcttatgtggccgcccacgcgccgtacctcgcgtggttaatgcgggccagcgaaaccagcgcggaagcggccgcccggcacgagaccgtggccgcggcctacacgaccgcggtggcggccatgccgacgttggtcgagctggccgccaaccacacgcttcacggggtcttggtggcgacgaacttcttcggcatcaacaccatcccgatcgcgctcaacgaggccgactacgcgcggatgtggacgcaggccgccagcacgatggcgacctatcaagcggtcgccgaggccgcggtggcgtcggcaccgcagaccaccccggcgccgccgatcttggcagccgaagcggccgacgatgaccacgatcatgaccacgatcacgggggcgaaccgaccccgctggactatctggtcgcggagatattgcgcatcatcagcggtgggcgcctgatctgggatcccgccgagggcaccatgaacggaatcccgttcgaagattatacggacgcagcccaaccaatctggtgggttgttcgtgccatcgaattcagtaaggactttgaaacgtttgttcaggaactgtttgtcaatccggtggaggcatttcagttctactttgagcttctattgttcgactacccgacccacattgtgcagattgttgaggcgttgagccagtccccgcagttgctggcggtcgcactcggttccgtcatctccaacttgggtgcggtgaccgggttcgccgggctatccggcttggccggcatgcagccggcggctatcccggcgctagcacccgtcgcggcggccccgtcgacattgccggcggtcgcgatggccccgaccatggccgcgccgggcgcggcggttgcgtcggcagccgcgccggcgtccgcgccggcggccagcacggtggccagcgccacgccggcaccgccgccggcacccggcgccgccgggttcggctatccctacgccatcgctccgcccggcatcgggttcggctcggggatgagcgccagcgccagcgctcaacgcaaggcaccacagcccgatagtgcggcggcggcggcggccgcggcggccgtacgtgaccaagcgcgggcgcggcggcggcgccgtgtcacgcggcgcggatacggcgacgagtttatggatatgaacatcgacgtcgatccggactggggccctccgcccggcgaagacccagtcacatccacggtggcctcggatcggggtgccggacatctgggctttgccgggacggcccgcagggaggcggttgccgacgcggccgggatgaccacgctggctggcgatgatttcggcgacgggccaacgacgccaatggtgccgggttcgtgggatccggaccgggatgcgcctggctcggcggagcctggagatcggggctga

SEQ ID NO: 51 - DNA, 909 bp, Mycobacterium Tuberculosis
gtgcgtaccgaaggtgatagctgggacatcacaacgagtgtcggttcgaccgcgctgtttgtcgcgacggcgcgagcgctggaagcccagaagtccgacccgctggtcgtcgacccatatgcggaggcgttctgccgtgccgtcggcggttcgtgggccgatgtgctcgacggcaagcttcccgaccacaagttgaagagcaccgatttcggcgagcacttcgtcaacttccagggtgcccgcaccaagtatttcgacgagtatttccgtcgggccgccgccgccggcgcgcggcaggtggtcatcctggcggcggggctggactcgcgcgcgtaccggctgccttggcccgacgggaccacggtttttgagctggaccgcccgcaggtccttgatttcaagcgcgaggtgctcgccagccacggtgcccaaccgcgcgccctgcgccgcgagatcgccgtcgacctgcgtgacgattggccacaagccttgcgggacagtggtttcgatgcggctgcaccgtcggcatggattgccgaagggctgctgatctatctcccggccaccgcccaggagcggctattcaccggcatcgatgccctggccgggcgccgaagccacgtcgccgtcgaggatggtgccccaatggggccagacgaatatgcggctaaggtcgaagaggagcgcgccgcgatcgccgagggagccgaggagcacccgttttttcaactggtctacaacgagcgatgcgcgccggccgccgagtggttcggcgagcgaggttggaccgcggtcgctacgctgttgaacgactacctcgaagcggtgggtcgcccggtacccggaccggaatccgaagccgggccgatgttcgcccgcaacaccctggtcagtgccgcccgcgtctga

SEQ ID NO: 52 - DNA, 633 bp, Mycobacterium Tuberculosis
gtgggcgttcccgccaagaaaaaacagcagcagggggagaggtcacgagaatcgattctcgacgcgaccgaacgcctgatggcgaccaagggctacgcggcgacctcgatcagcgacatccgcgacgcgtgcgggctagcacccagctctatttactggcacttcggctccaaagagggcgtgctggccgccatgatggagcgcggcgcgcagcgcttctttgccgcgatacccacctgggatgaggcccatgggcccgtcgagcagcgatccgagcgccagctgaccgagctggtgagcctgcagtcgcagcatccggacttcctgcgcctgttctacctgctgtcgatggaacgaagtcaggatccggcggttgccgcggtggtgcgccgggtccgcaacaccgcgatcgcccgatttcgtgacagcatcacgcacctgctgccatcggacatcccgccgggcaaagccgatctcgtcgtcgcggagctgaccgcgttcgcggttgcgctgtcggacggcgtctatttcgccggccaccttgaaccggacacgaccgacgtcgagcgcatgtaccggcggctgcggcaagcgctcgaggccctgattcccgtcctcctggaggagacatga

SEQ ID NO: 53 - DNA, 717 bp, Mycobacterium Tuberculosis
atgactcgcccgcaagcgcttctcgctgtttcgctcgcttttgtcgcaaccgcggtgtatgccgtcatgtgggtggggcactcccaggattggggttggctgcatagtttcgattggtcgttgttgaacgcagcgcacgacatcgggataaagaaccctgcgtgggtgcgcttctgggatggtgtatccctgatcttgggcccagtcgtgctgcggccgctgggtttgctggccgcgatggtcgcactggcgaagcgcaagatacggatagcgttgttgctgttggcctgtttaccgctcaacgcgatcatgacgatcgcggccaaatccgtggcccaccgcccgcgaccggcgactgcgctggtatctgcccattcgacttcgtttccgtcagggcatgcgttggaggcgaccgcaagcgtactcgcgctgctaaccgtcctgttgcccatgctgcacagcaggtttactcggcacatcgccatcacggtgggcgcgctgtgcgtgttgacggtcggtgttgccagggtggcgttgaacgtgcatcatccgaccgacgttgttgccggctgggcgctggggtacctgtatttcctcgtgtgcctgtgcgtatttcgaccgccgtcgatattcggtgcccaacgcgcgtctcatgctttgtcgccgccagtggaggtgtcgagacaacccgaaccggaagtcgacacggcccgctaa

SEQ ID NO: 54 - DNA, 1230 bp, Mycobacterium Tuberculosis
atgagccaatcccggtacgcggggttgtcccgcagcgagctggcagttctgttacccgagctgttgttgatcggccagctgatcgaccgatcgggcatggcctggtgtatacaggcattcggccgccaggagatgctgcagatcgccatcgaggagtgggcgggcgccagcccgatctacaccaagcgcatgcaaaaggcgctgaacttcgagggcgacgacgtgcccaccatcttcaaggggctacagctcgacatcggcgcgccgccgcaattcatggacttccgtttcaccctgcacgaccgctggcacggcgagtttcacctcgaccactgcggtgcgctgctcgacgtggagccgatgggcgacgactacgtcgtcggcatgtgccacaccatcgaagatccgacgttcgacgccaccgcgatcgcgaccaacccgcgcgcgcaggtgcgccccatccaccggccgccccgcaagccggccgaccggcatccgcactgtgcgtggaccgtcatcatcgacgagtcctatcccgaggctgagggtattccggcgctggacgcggtccgtgaaaccaaagctgccacctgggaattagacaacgtcgatgcgtctgacgacgggctggtggactattcgggtccgctggtgtccgacctggacttcggggcgttctcgcattccgcactggtgcggatggccgatgaggtctgcctgcaaatgcacctgctgaatctgtcgttcgccattgccgtgcggaaacgggccaaagccgatgctcaactggccatttcggtgaacacccgccagttgatcggagtggccgggctgggcgcagaacgcattcaccgtgcgatggctttacccggcggaatcgaaggcgcgttaggtgtgctggagctacacccgctgctcaacccggccggttacgtgctggccgaaacgtcgccggaccgtctggtggtgcacaactcgccagcccacgccgacggcgcctggatttcgttgtgcacaccggcatccgtgcagccgttgcaggccatcgccaccgctgtagacccgcatctgaaggttcggatcagcgggacggacaccgactggaccgcggaactcatcgaggccgatgccccagcgagcgaactgccggaggtgttggtagccaaggtcagtcgcggatcggtcttccagttcgagccgaggcgctcactgccgttgaccgtgaaatga

SEQ ID NO: 55 - DNA, 2499 bp, Mycobacterium Tuberculosis
gtgcagcacagggggtgcaagaaccgtggccaagcatacgacgcatcggtgaccgattccctcaccgaggtcccgccggcagcacgccgtgccctcctggaactcgcgaatgccccgacggtaccggtcaaggtcctgatcaccgggggcatcggaacgggcaagaccaccgttctggctgccgcccgcgacacactgcgccgctcgggactcaccgtgctggcatgcccgccgccagacggcgaaccgccggagaccgcgctcgtcatcgacgacgcccagttgctcaccgataccgaattgctccggctcaccgagcgcgtggccgattcacggctgacggtggtggcggccgcggaagcccgcgagcaccaccgggcactacgagccctgacgatggcgctcgaacgggaccggccacgaatctcgctcggtccacttccggttgccgagcacctgcgagattgcaccgcgggactgccgttcctcattcatgcggtttccgccagggcacaggctcccgcgcaagcggccaaggtggccctcatcgagcggctgcgccgcctcgacgaacccactctggacaccctgctcatgatgtcgctaacccacgagctaggggtcagcgatgtagctgctgcacttgggatttcggtaacggatgcccgcggattggtcgatcgtgcgcacgccagcggactgatcgagtcgtcacacaccgcggcgtttctgcagtcagtccatgatgcgatcgctcagatcgtcggcaatgcacaccaccacgaggtcgaaacctcgctgttacgctcacaactcgatatctcgccggtgtcggcggagctagcgctgcgactggccgaacacgggctgcgcgacgagcggctggcggacatcctcacgcggtacgccgcggacacccgcgacgcttcggtccgttgcgcacggctgtaccgcgccgcggtccatgccggcgccaaaggattgacggtccgcctggccgacgcactggcccgcaccggcgactgtacggccgcggcaacactagccgacgatctgctcagctccccggatgccaccgaacgcgctgccgcggtgcgggttgcggccagcgtcgcggtccacgacggcaacacgggacacgcagccgagttgttcggctggctgggcccacacccggacacgatggtgagctcggccgccacgatcgtgttcgccgcgaacggcgacctggcgacggcgcgtgccaccctgcgactcaaggatgccggtccaccgacgatggcagcgcgttgcgcgcgcaacctcgccgaggggctgctgctgaccatggatcagccgtatccggtcgcgatggcaaaactgggccaagccattgccaccgaacaatcgctcagccaagtcattccggacagcccggcagcgctggttaccttggccgcgatacacgccggcgatccggtccgcgcccgcagtgtgatcgggcgtgccgtgcgagccggcgccgacccgctgttccagcgtcggcacctgctgctttccggctggatcaaaatgcaagaggggcaattgccgtcggcaagcgcggacgtcgcggcggccagcgccggcacgcacctgcaccggcgcgacgcgttgtgggccgcggcactgcaaaccgcgatctcgcgtcgcaccggcgatatcggtgcgctgcaacagcattggtatgcggcgatggaagcgctggccgagtattcgctcgatctgttcgccctgctgccacttggtgaactgtgggtcgcggccgcccgaatgcgccaggttgaccagctacaacacaccctggatcaggcgctcacgctgctggattcgctgggcaaccccgccctgtggtcgaactcactgcattgggctggagtgcacgctggaatcctcgccaattcgccggaatcggtggcaccgcacggacaggccctcggtgcaatggtcgcccacagcacgctcgcgcaggccctgtcggatgccggtcgcacctggctgcgggtcctggccgaaaacgtcgacgccgacgaggtcaccgcggcggcgcggtccctgtcacacgtcggcctgacgtcggatgcgacccgactggcaggtcaggccgcattgcaaacatccgacgcacgggtgtccggtgccatgctgcagttggcacgggatcttaagctgggcaacgatttcggcgagccccccagcggggccggcgacacggaaccagcttccggtaccccgccggcaccgcgccagccaccggcgggctcgccgctatccgatcgcgaacgcgaagtcgccgagctactgctactgggcatgccctatcgcgacattggcgcccggctgttcatctcagcgaagacggtcgagcaccacgtcgcccggatacgccagcggctgggcgctggctcccggtcggagatgttgtcgatgctgcgggccatgctggccccggagagcttaaccgcagatgagaggcgttga

SEQ ID NO: 56 - DNA, 540 bp, Mycobacterium Tuberculosis
gtggcaaactcgttgctcgactttgtcatctcgcttgtgcgcgacccggaagcggccgcacgttacgccgcgaaccccgagcggtcgatcgccgaagctcaccttaccgacgtgaccagagcggatgtgaacagcctgatcccggtggtgtcggattcgttgtcgatgtccgaacccatcggagccgctggcggggcacacgctggcgatcgtggcaacgtttgggcgagcggcgcggccacggctgcgcttgatgcgttcgccccacacgccgatgcgggtgttgtccaacagcacggtgcggtcggcagcgttctcaaccagccgaccccacccggaccgggcgtgacacccaccgatccgcgccccttccgagccggtccacatgagacgtcggcgctgctcacgagcgctgaaatacccgacacgaccagcgaggacgggggattgccgacagaccatccggctgtctggaaccacccggtcgttgacccacataccgtcgagcccgatcatcacggctacgacatccacggataa

SEQ ID NO: 57 - DNA, 1878 bp, Mycobacterium Tuberculosis
atggctcgtgcggtcgggatcgacctcgggaccaccaactccgtcgtctcggttctggaaggtggcgacccggtcgtcgtcgccaactccgagggctccaggaccaccccgtcaattgtcgcgttcgcccgcaacggtgaggtgctggtcggccagcccgccaagaaccaggcagtgaccaacgtcgatcgcaccgtgcgctcggtcaagcgacacatgggcagcgactggtccatagagattgacggcaagaaatacaccgcgccggagatcagcgcccgcattctgatgaagctgaagcgcgacgccgaggcctacctcggtgaggacattaccgacgcggttatcacgacgcccgcctacttcaatgacgcccagcgtcaggccaccaaggacgccggccagatcgccggcctcaacgtgctgcggatcgtcaacgagccgaccgcggccgcgctggcctacggcctcgacaagggcgagaaggagcagcgaatcctggtcttcgacttgggtggtggcactttcgacgtttccctgctggagatcggcgagggtgtggttgaggtccgtgccacttcgggtgacaaccacctcggcggcgacgactgggaccagcgggtcgtcgattggctggtggacaagttcaagggcaccagcggcatcgatctgaccaaggacaagatggcgatgcagcggctgcgggaagccgccgagaaggcaaagatcgagctgagttcgagtcagtccacctcgatcaacctgccctacatcaccgtcgacgccgacaagaacccgttgttcttagacgagcagctgacccgcgcggagttccaacggatcactcaggacctgctggaccgcactcgcaagccgttccagtcggtgatcgctgacaccggcatttcggtgtcggagatcgatcacgttgtgctcgtgggtggttcgacccggatgcccgcggtgaccgatctggtcaaggaactcaccggcggcaaggaacccaacaagggcgtcaaccccgatgaggttgtcgcggtgggagccgctctgcaggccggcgtcctcaagggcgaggtgaaagacgttctgctgcttgatgttaccccgctgagcctgggtatcgagaccaagggcggggtgatgaccaggctcatcgagcgcaacaccacgatccccaccaagcggtcggagactttcaccaccgccgacgacaaccaaccgtcggtgcagatccaggtctatcagggggagcgtgagatcgccgcgcacaacaagttgctcgggtccttcgagctgaccggcatcccgccggcgccgcgggggattccgcagatcgaggtcactttcgacatcgacgccaacggcattgtgcacgtcaccgccaaggacaagggcaccggcaaggagaacacgatccgaatccaggaaggctcgggcctgtccaaggaagacattgaccgcatgatcaaggacgccgaagcgcacgccgaggaggatcgcaagcgtcgcgaggaggccgatgttcgtaatcaagccgagacattggtctaccagacggagaagttcgtcaaagaacagcgtgaggccgagggtggttcgaaggtacctgaagacacgctgaacaaggttgatgccgcggtggcggaagcgaaggcggcacttggcggatcggatatttcggccatcaagtcggcgatggagaagctgggccaggagtcgcaggctctggggcaagcgatctacgaagcagctcaggctgcgtcacaggccactggcgctgcccaccccggcggcgagccgggcggtgcccaccccggctcggctgatgacgttgtggacgcggaggtggtcgacgacggccgggaggccaagtga

SEQ ID NO: 58 - DNA, 9903 bp, Mycobacterium Tuberculosis
atgagcttcgcggtgctgcccccggagatcaattcggcgcgcctgtacgtgggtgccgggttggcgccgatgctggacgcggcggccgcttgggatggactggccgacgaattgggttcggccgcggcctcgttttcggcggtgacggcggggctggcaggttcctcgtggctgggcgcggcgtcgacggcgatgacgggagcggccgccccctatctgggctggttgagcgcggcggcggcgcaggcccagcaggcggccacccaaacccggctggcggcggccgccttcgaggcagccctggcggcgacggtacatccggcgatcatctcggccaaccgggcactgttcgtgtcgctggtggtctcgaacctgctgggccaaaacgccccggcgatcgcggccaccgaggccgcctacgagcagatgtgggcccaggacgtggcggcgatgtttggctaccatgccggggcttcggcggccgtctcggcgttgacaccgttcggccaggcgctgccgaccgtggcgggcggcggtgcgctggtcagcgcggccgcggctcaggtgaccacgcgggtcttccgcaacctgggcttggcgaacgtcggcgagggcaacgtcggcaacggtaatgtcgggaacttcaatctcggctcggccaacatcggcaacggcaacatcggcagcggcaacatcggcagctccaacatcgggtttggcaacgtgggtcctgggttgaccgcagcgctgaacaacatcggtttcggcaacaccggcagcaacaacatcgggtttggcaacaccggcagcaacaacatcggcttcggcaataccggagacggcaaccgaggtatcgggctcacgggtagcggtttgttggggttcggcggcctgaactcgggcaccggcaacatcggtctgttcaactcgggcaccggaaacgtcggcatcggcaactcgggtaccgggaactggggcattggcaactcgggcaacagctacaacaccggttttggcaactccggcgacgccaacacgggcttcttcaactccggaatagccaacaccggcgtcggcaacgccggcaactacaacaccggtagctacaacccgggcaacagcaataccggcggcttcaacatgggccagtacaacacgggctacctgaacagcggcaactacaacaccggcttggcaaactccggcaatgtcaacaccggcgccttcattactggcaacttcaacaacggcttcttgtggcgcggcgaccaccaaggcctgattttcgggagccccggcttcttcaactcgaccagtgcgccgtcgtcgggattcttcaacagcggtgccggtagcgcgtccggcttcctgaactccggtgccaacaattctggcttcttcaactcttcgtcgggggccatcggtaactccggcctggcaaacgcgggcgtgctggtatcgggcgtgatcaactcgggcaacaccgtatcgggtttgttcaacatgagcctggtggccatcacaacgccggccttgatctcgggcttcttcaacaccggaagcaacatgtcgggatttttcggtggcccaccggtcttcaatctcggcctggcaaaccggggcgtcgtgaacattctcggcaacgccaacatcggcaattacaacattctcggcagcggaaacgtcggtgacttcaacatccttggcagcggcaacctcggcagccaaaacatcttgggcagcggcaacgtcggcagcttcaatatcggcagtggaaacatcggagtattcaatgtcggttccggaagcctgggaaactacaacatcggatccggaaacctcgggatctacaacatcggttttggaaacgtcggcgactacaacgtcggcttcgggaacgcgggcgacttcaaccaaggctttgccaacaccggcaacaacaacatcgggttcgccaacaccggcaacaacaacatcggcatcgggctgtccggcgacaaccagcagggcttcaatattgctagcggctggaactcgggcaccggcaacagcggcctgttcaattcgggcaccaataacgttggcatcttcaacgcgggcaccggaaacgtcggcatcgcaaactcgggcaccgggaactggggtatcgggaacccgggtaccgacaataccggcatcctcaatgctggcagctacaacacgggcatcctcaacgccggcgacttcaacacgggcttctacaacacgggcagctacaacaccggcggcttcaacgtcggtaacaccaacaccggcaacttcaacgtgggtgacaccaataccggcagctataacccgggtgacaccaacaccggcttcttcaatcccggcaacgtcaataccggcgctttcgacacgggcgacttcaacaatggcttcttggtggcgggcgataaccagggccagattgccatcgatctctcggtcaccactccattcatccccataaacgagcagatggtcattgacgtacacaacgtaatgaccttcggcggcaacatgatcacggtcaccgaggcctcgaccgttttcccccaaaccttctatctgagcggtttgttcttcttcggcccggtcaatctcagcgcatccacgctgaccgttccgacgatcaccctcaccatcggcggaccgacggtgaccgtccccatcagcattgtcggtgctctggagagccgcacgattaccttcctcaagatcgatccggcgccgggcatcggaaattcgaccaccaacccctcgtccggcttcttcaactcgggcaccggtggcacatctggcttccaaaacgtcggcggcggcagttcaggcgtctggaacagtggtttgagcagcgcgatagggaattcgggtttccagaacctcggctcgctgcagtcaggctgggcgaacctgggcaactccgtatcgggctttttcaacaccagtacggtgaacctctccacgccggccaatgtctcgggcctgaacaacatcggcaccaacctgtccggcgtgttccgcggtccgaccgggacgatcttcaacgcgggccttgccaacctgggccagttgaacatcggcagcgcaaatctcggcgacttcaacctgggcagcggaaacgtcggcagcttcaacgtcttctccggaaaccagggctcatacaatatcggtccggcgaacctgggtaactacaacatcggtttcgcgaacctgggtaactacaacatcggcttcggcaacgccggcgatttcaaccaaggctttgccaacaccggcaacaacaacatcggatttgccaacaccggcaacaacaacatcggcatcgggctgtccggcgacaaccagcagggcttcaattttgctggcggctggaactcaggcaccgcgaacatcggcttgttcaactccggcaccaacaacgtcggcatcggcaactcgggcaccggcaactggggtatcggcaactccggcagcggcaacaccggcatcggcaacaccggcagcactaacacgggcttcttcaacaccggcatcgtcaacaccggtgtcgccaacgcgggcagctacaacaccggctggtacaacaccggcgacaccaacaccggcatcgccaacctgggcgacttcaacacgggcttctacaacaccggcaatttcagtacgggctttgccaaccagggtgatatcgccaccggggctttcatcaccggcgacatgggcaacggcgccttctggcgcggcgaccagcagggcctattcagcgcgggctatcgggtccatgttcccgaaatacccgcacacgtcaccgtggaagttcccgtcaacatccccatcaccgccagcttcaccaacaccgtctacagcggcataacgcttgagcaaatcaacttcggtttcaccatcgacatcgcagggatccccctgctggccggtgcaatcagcaaggccgttctcccgcccatcaccgggaccggtcccgcgatcacggtcaacatcggcgaccctggcggttcgaccgcgatcaggatcccggccaccgcaagcgtcggtcccttcgatgtcacgttcgtcaacattgcggctaccacgggctttttcaacgccaccaccgatccgtcctcgggcttcttcaacggcggccccggaaccgtatcgggcatcgccaacatcggcgccaacatttccggcttccagaacgtcgcgaactccgcgacctcgggcttcaacaactacggctcgctgcaatcgggactggcgaacctgggcgataccgtctcgggcgtattcaacaccggcatcggggcaccggccaacgtctcgggcatgttcaacatcggcagcaacctcgcggggttcttccacgaccaggcgaccgggatgtcgatgttcaacctcggcctgggaaacatcggccaattcaacgtcggcttctccaacgtaggcgacagcaacgccggcttggcgaacatcggcagcttcaacctcggcagcggcaacctcggcagcttcaacgtcttcggcggaaaccagggctcatacaacatcggcccggcgaacctgggtaactacaacatcggcctaggcaacctgggcagctacaacttcggattcggcaacgccggcgacttcaacctgggcttcgccaacaccggcaacaacaacatcgggtttgccaacaccggcaacaacaacatcggtatcggcctgtccggcgacaaccagcagggcttcaattttgccggtggctggaactccggcagcggcaacagcggcctgttcaactctggcaccaacaacatcggtttgttcaactcgggcaccggcaacatcggcatcggcaactcgggcaccggaaactggggcatcgccaacaccggtgacaccaacaccggcatcttcaacaccggcgacgtcaacaccggcttgctcaacgccggcaacgtcaacaccggcatcttcaacaccggccattacaacaccggcagcttcaacgccggcagcttcaacacggccggcttcaacccgggtagctacaacacgggttatttgaacaccggcagctacaacaccggactggccaactcgggcgatgtcaacaccggcggcttcatcaccggcaattacagcaacgggttctggtggcggggcgattaccaaggcctggcggggatcagccaaacgatcaccgtgcccgacaccgccgttccggtgaaactgcacgtgccgatcttcctcgatatcccggtcaccggcacacttggcacgttcaccgttcatggcttcagattcccggagatcaccggcgatatcttcttgatcggcataccgttcaatgccgccacactcgatgcattcagtttcccgaacatctcgattgtccttcccaatatcggcatcaacctgggtagcgggccggacccgctgatcgatatcgccggcaccggcggtctattgccgatcaagattccactcatcgatataccggcggccccgggattcgggaactcgacgaccaccccgtcgtcgggattcttcaacgccggtaccggtaccgtgtcgggcgttggcaacgtgggcagcaatagttccggcttcttcaacctcacctctggaagctcgggaatctcgggcgtccagaacttcggcgagctgatctccggcgggttcaacttcggtaacactgtctccggccttgtcaatgcgagcacgcttgggctttcgatgccggccaatctctccggcggagggaatgtcggtgctacggtcgccggcttcgtcaacaacacccagatcctcaacctcgggtttggcaacgtaggcagcgggaatgtcggccacggcaatatcggcgactccaacgtcggcctcggaaacctcggcaacgcgaacgtcggccatggcaacatcggcagcttcaacgtcttctccggaaaccggggctcatacaatatcggcccggcgaacctgggtaactacaacatcggcctaggcaacctgggcagctacaacttcggattcggcaacgccggcgatttcaacctgggcttcgccaacagcggcagcaacaacatcgggtttgccaacaccggcaacaacaacatcggtatcgggctgtccggccacaatcaacaggggttcggctcctggaactccggtaccgccaacaccggcctgttcaactcgggcaccaacaacatcggtttgttcaactcgggcaccggaaacatcggcattggcaactcgggcatcggaaacaccgggatcggcaacccgggtgtcggcaacaccggcttggggaactcgggcaccggcaactggggcctgtggaacccaggcaccggcaatatgggcgtcgccaacgtgggcacctacaacaccggtggctacaacgtgggcagcaccaacaccggcatcgccaacgtgggcatcgccaacacgggcagctacaacaccggcagcaccaacaccggcagcttcaacgacggcgacttcaataccggcttctacaacaccggcgactacaacaccggcttctacaacaccggcgacgtgaacaccggcgccttcatcgggggcaacttcagcaacggcgccttctggcagagcgatcaccaaggccagtggggcgcacactacgcaatcactgttccccagatcccgctactgaactttagcctcaacattccggtcaacatccccatccatctcgacttcggtacccttgccgtcaacggcttccagattccggctatcaccctccgcgccctcggggtcacccacttcagcgtcggacccatcatcgttccgaggatcgccggcaccttaccggtgatcgatatcaacatcggcgaccccggcggttcatcctcgatacccatcacgatcaccagcggcgccggcccggtcgtcatcccgctactggacatcccgccggcccccggtttcggaaactcgaccaccggcccctcatcgggcttcttcaactccggcaccggcagctcgtctggattcggaaacgtcggcgccaacaattcgggcttctggaacaccgctttcgccggcataggaaactctggcttgcagaacttcggctcgctgcaatccggctgggcgaacttgggcaacaccgtctcgggcttctacaacaccagtgcggcggacttcgcgacgccggctaacctctcgggactctccaacgtcggcgccgacctgaccggcgtgctccgcggcccgaacgggtcgaccttcaacgcgggcctggcaaacctcggccaattcaacgtgggcagtgcaaacctcggcagtgcaaacctcggcagtgcaaacctcggcagtgcaaacctcggcaattcaaacgtcggcttcggcaacattggcaacgcgaacatcggcggcgcaaacatcggcgactttaacgtcgggatcgcaaacaccggtccggggctaacggcggctgtcaacaacatcggtatcggcaacaccggcaactacaacatcggtgtcggcaacaccggtaactacaacatcggcttcggcaacaccggcaacaacaacatcggcatcggcctgtccggcgacaaccagatcgggttcggcccgctgaacgccggcatcgccaacatgggcctgttcaacctgggcgacaacaactttggcatggccaacgcgggcaacttcaaccagggcattgccaacaccggcaacaacaacatcggcttgttcaacaccggcaacaacaacgtcggcatctggctgaccggcgacggcttgtccggcttcagctccctgaactccggcgccggcaacaccggtttcttcaactccggcaccgccaacaccggcttgttcaactccggcaccggcaacaccggcttgttcaactcgggcaccggcaacgtcggcatcggcaacatgggcaccggcggcttcggcgtcggcctatccggcgacagccaggtgggcatcggcggcaccaactcgggcagtttcaacatcggcttgtttaactcgggcaccggcaatgtcggcatcggcaactcgggcaccggcaacgtcggcatcggcaacaccggcaccggcaacaccggcatcggaaacagcggcaactacaacaccggcttgctcaacgcgggcctggtcaacaccggcatcgccaacccgggcaaccacaacaccggcctgttcaacatcggcaccttcaacaccggcatcgccaacccgggccactacaacaccggctcctacaacaccggtagctacaacaccggcatggcaaacgccggagactacggcaccggcgcgttcatcaccggcagcatgaacaacggcttgctctggcgcgccgaccggcagggcctgctggcggccaactacaccatcaccatcgagcgacctgccgcgttcctcaatgtcgacatcccggtcaacatccccatcaccggcgacatcaccaatgtctccatccccgccattacgttccccagaatcgacgccagcggaagcgtcgacataggcatcctcagtggcaccgtcttggccccggtcggtccgatcaccctgcatggcggggacgcgtcggccccgctggacacacccatcgaaattgacttcggcccctcgccggcgatcaacctcaacatcggcaagcccgacggctccaccgtgatcaacatcgtgggcggcgccggcgccggcccgatcagcattccgatcatcgacttgcggccagcgcccggcttcttcaacgccaccaccggcccgtcgtcgggcttcctcaactggggtgctggcagcgcatcgggcttgctgaacttcggcaacaactcgggcctctacaacttcgccactagcagcatgggaaattcgggcttccaaaactatgggtcgctgcagtcgggctgggcgaatttgggcaacagcatctcgggcatctacaacaccggcttgggagcaccggcaaatgtctcgggcttgctcaacatcggcaccaacctggctgggtggttgcagaacggcccgaccgagacgaccttcagcgtgggcttggccaacctcgggttctggaatctgggtagcgcaaacatcggcaactacaacctgggcagcgccaacatcggcgtctacaacctgggcagcgccaacatcggcgacttcaacctgggcagcgccaacatcggcgacttcaacctgggcagcgccaacatcggcagctccaacatcgggttcggcaacgtcggtccggggctgacggcggccatcggcaacatcggcttcggcaacaccggaaacggaaacatcggcatcggcaataccggcaccggcaacatcggcttcggcaacaccggaaacggaaacatcggcatcgggctgaccggcgacaccatgaccgggttcggcggctggaactcgggcaccggcaacatcgggctattcaactccggcaccggcaacatcggcttcggcaactccggcaccggcaactggggcatcggaaactccggtgactacaacaccggcatcggcaacaccggcagcaccaactccggcttcttcaacaccggcctggtcaacaccggcattggcaactccggtgactacaacaccggcctattcaacgccgggaacaccaacaccggcagcttcaaccccggcgactacaacaccggcggcttcaaccccggtaactacaacaccggctacttcaacccgggcaactccaacaccggcatcgccaactccggcgatgtcaacaccggcgccttcaattcgggcaactacagcaacggcttcttctggcggggcgactaccagggcctaggcggtttcgcctaccagagcgccgtttccgaaatcccgtggagctacgacaggttccaacattga

SEQ ID NO: 59 - DNA, 1299 bp, Mycobacterium Tuberculosis
atgccggcgatcgtcctcatcggcgcccaatggggcgacgagggcaagggtaaggccaccgacctgttgggtggccgcgtgcagtgggtggtgcgctatcaggggggcaacaacgccgggcacaccgtcgtcttgcctaccggcgagaatttcgcattgcatctcatcccgtcgggtgtgctgacgcccggggtcaccaacgttatcggcaacggcgtggtgatcgatcccggtgtcctgctcaatgagctgcggggactgcaagaccgcggcgtggacaccgccaagctgttgatctccgccgacgcccatctgctgatgccttaccacattgctatcgacaaggtcaccgagcgctatatgggcagcaagaagatcggcaccaccggccgtggtatcgggccgtgctaccaggacaagatcgcccgtattgggatccgggtcgccgatgtgctggacccggaacaattgacccacaaggtcgaggccgcgtgcgagttcaagaaccaagtgctggtcaagatctacaaccgcaaggccctggaccccgcgcaggtggtcgacgcgctgctggagcaggccgagggtttcaagcatcgcatcgccgacacccggctgctactcaatgctgccctggaggccggcgaaacggtgctgctggaaggctctcaaggcaccctgctcgatgtcgaccacggcacctacccgtatgtgacatcgtcgaatccgacggcgggtggcgcggccgtgggctctggtatcggcccgacccgcatcggcaccgtgctggggattctcaaggcctacaccactcgggtgggctccggcccgttccccaccgagctgttcgacgaacacggcgaatacctgtccaagactggccgcgagttcggtgtgaccaccggccggcgccggcgctgcggctggttcgacgccgtcattgcccgctacgccgcccgggtcaacggcatcaccgactacttcctgaccaagctcgacgtgctgtccagcctggaatcggtgccggtctgcgtcggatatgagatcgacggccggcgcacccgcgatatgccgatgacccagcgggatctttgccgcgccaagccggtttacgaggagctgccgggctggtgggaagacatctccggggcgcgcgagttcgacgacctgcccgccaaagcgcgtgattatgtgctgcgactggaacagcttgccggagcaccggtttcgtgcattggagtcggtccggggcgggaacagaccatcgtgcgccgggacgtcctgcaggatcgcccgtga

SEQ ID NO: 60 - DNA, 1383 bp, Mycobacterium Tuberculosis
gtgagcatccgccccgccgagaactcaacactcgacatccgccacgtcatcggtatcggcaccccgaaagccgtcgatttgtggctcgacgtcgtcaccgagctgccggatcgcgcccgcgaactcgggtcgttatccaaagccgaactcggaaagcttggcccactgctcgacggcaccaacgccgtcgagctattcgagtcgatcgacgacaagctggccgcagaggcactgcacgcgatggatccgtcgctggccgccaccttcctcgaggccctcgactccgaccacgccgccaacatcctgcgcgaattcaaggagcccaagcgggaggcgctgctgacgttgctaccgctggagcgggcgatggtgctgcgtggcttgttgagctggccggaggactgcgccgcggcccacatggtgcccgaaacgctgaccgtacgcccgaacatgacggtgtcgcaggccgtcgccagcgtgcgggaacgcgcctcgggcctgcgcagcgatgcacgaaccaccgcctacgtctatgtgacagacgccgactcccacctgctgggtgtgatcgcctttcgcgccctggtgctggccaatcccgaacagcgagtccgtgagctgatgggtgacgacctcatcgtcgtgtcgccgttgactgacaaggagctcgcggcgcagacaatcatgggccacaacctgatggcggttcccgtcgtcgatgccgacaaccggctactgggcatcatcgccgaagacgaagccatcgacattgccgaggaggaagcaaccgaagacgccgagcgccagggtgggtcggccccgctcgaggtgccctacctgcgggcgtcgccgtggctgctatggcgcaagcgggtcgtctggctcctggtactttttgctgccgaggcctacaccggcagcgtcctgcgggcgttctccgacgaaatggaggcggtgatagcgctcgcgttcttcatcccactgctgatcggcaccggcggcaacaccggcacccagatcgccaccactctggtccgcgcgatggccaccggtcaggtccggtttcgcgatgtgcctgcggtgttagccaaggagctgtcaaccggtgtgctggtcggcctcactatggccgccgccgcggtggtgcgcgcctggacattgggcgtgggcccgcaggtgaccctgacggtcgcgctgacggtggccgccatcgtggtgtggtcgtcgctggtggctgccgtccttccgccgctgctgaagaagttgcgcatcgacccggccatcgtttcggggccgatgatcgccaccatcgttgacggcacgggtctgctcatctacttcctggtcgcgcacctgacgctgaccgagctgcacggcttgtga

SEQ ID NO: 61 - DNA, 390 bp, Mycobacterium Tuberculosis
gtgcccaaagccgtcgaccgcgtcacgcgcgtcgccgcggatctggtggacagcgcggcggccgagggtgctcgtcagagccgttcggccaagcagcagctcgaccactgggcccgcgtcggtcgggcggtgtcgaaccagcacacggcgtcgcggcgccgcgtggaagctgcgctcgcggggcatctgccgatgacggacctgacgctggaggagggcgtggtgttcaacgccgagatctccgcagctatcgaggagcgcctgtcgcgaaccaactacggcgacgtgctcgccgcgcagggcatcaccacggtcgccctgaacgacgcgggcgacatcgtcgagcaccggccagacggcacctcggtcgtgctggcggccacgccgtga

SEQ ID NO: 62 - DNA, 897 bp, Mycobacterium Tuberculosis
gtgaccttcgcaagtcccgacgacgtgatccgccggttcgacgaacagaactacctgctggataccggcacggcgtcggcaatctatctggcggttacgctgggcaggccgctgttgttggagggtgagcccggtgttggcaagacaacagccgcgaaaacccttgcagtcgtgttggataccacgctgatccggctgcaatgctatgaagggctgacggccaacgaggcgctctacgactggaactaccaacgccagctattgtccatcaggctggccgaggcgcgcggcaagggtatctcagacatatcggaagcggatctgtacaccgaggcgtatctggtggaccggcccatcctgcggtgcgtgcggcaccgcggaccgacccctccagtgctgctcatcgatgaaatcgaccgggccgacgacgaattcgaggcgttactgctggagttccttggtgagtccgcggtgaccgttcccgagctgggcactttcctcgcggagtgcccgccgatcgcggtgctcacgtccaaccgcagccgtgacctgcacgacgcactgcggcggcgctgcctctaccactggatcgactacccggggccggaccgggcggccgcgatcgtgcgccgcacggtgcccggggctaccgcgccgttgatcgagaacgccactcaattcgtttgcactgcacgggatctcgatctggacaagccacccggtgtggccgagactatcgactgggtggcggctttggtggcactcggggtcgcagacctcaccgcagcggattcgagtcccgctctggccagccttggggccctggccaaaacgcccgacgaccgtacgcagattcgcgatgcgtaccaagcttttactgagtgcagccacgcatga

SEQ ID NO: 63 - DNA, 2400 bp, Mycobacterium Tuberculosis
atgacaacgatcgagtcacgccctccgtcgccggaagacctagccgacaacgctcagcagccgtgcgggcacggccggatgatgcgcaaagaggacccgcgattcatccgcgggcgcggaacctacgtcgacgacgtcgcgctgccgggcatgttgcatctggccatcctgcgttcgccgtatgcgcatgcccgcatcgtgcgcatcgatgtgactgccgcgcaggcacatccgaaagtcaaggccgtggtgaccggcgccgatctggccgccaagggcctggcttggatgccgacactagccaacgacgtacaagccgtgctggccaccgacaagacgcgcttccagggccaagaggtggcgttcgtggttgccgaggaccggtattcggcccgcgatgcatgcgagttggtcgacgtcgactacgaaccgcgggatcccgtcgtggatgcccgcacggcgctggacccgtcggcgccggtcatccgcaccgatctggagggaaagagcgacaatcacatcttcgactgggagaccggcgacgcggcggcgaccgaggcggtgttcgccaaggccgacgtcgttgtccagcaggagatcgtctacccgcgggtgcacccggcgccgatggaaacctgtggcgcggtggccgatctagatccggtcaccggaaagctgacgctgtggaccaccagccaggcgccgcacgcgcatcgcacgctatacgcgctggtggccgggttgcccgaacacaagattcgggtgatctcgcccgacatcggcggcggcttcggcaacaaggtgccgatctatcccggttatgtctgtgccattgtcgcgtcgctgctgctggacaagccggtcaaatggatggaggaccgcagcgagaacctgacgtccaccggattcgcccgcgactacatcatggtcggcgagattgccgccaaccgtgacggcaagatcctggcgatccggtccaatgtgctggccgaccatggtgcgtttaacgcccaggccgcgccggcgaagtacccagccgggttcttcggggtgttcaccggcagctacgacatcgaggccgcctactgtcacatgaccgcggtgtataccaacaaggcgcccggcggggtcgcctacgcgtgttcgttccgcatcaccgaagcggtctacttcgtcgagcggctggtggactgcctggccttcgagctgaagatggatccagccgagctgcgcttgcggaatctattgcggcccaaccagtttccgtatcagagcaagactggttgggtgtacgactcgggcgactacgagaccacaatgcgtaaggcgatgaacatgatcggctacgaggcgttacgcgccgaacaaaagcagcggcgagcgcgcggcgagctgatgggcatcgggatgtcatttttcaccgaggccgtgggcgccgggccgcgcaaggacatggacatcctcggcctgggcatggccgacggctgcgagctgcgcgtgcacccgacgggcaaagccgtgctgcggctttcggttcagacccagggccagggccacgagacgacgttcgcgcagatcgtcgccgaggagctggggattgcgcccgacgacatcgaggtggtgcacggcgacaccgaccagacaccgttcgggttgggcacctacggcagccggtccacacccgtctcgggtggtgccgcggcgctggtcgcccgcaaggtgcgcgacaaggccaagatcatcgcctcgggcatgctcgaggtttcggtcgccgacttacagtgggagaaagggaagttccacgtcaagggtgacccgtcggccgcggtgaccatcgccgacatcgcgatgcgcgcgcacggcgccggcgatctgcccgagggcatcgagggcgggctggatgccgaggtctgctacaacccgtcgaatctgacctacccgtacggcgcctacttctgtgtggtcgacatcgacccgggcaccgcggtggtgaaggtgcggcgctttttggccgtcgatgattgcggaacccggatcaacccgatgatcatcgagggtcaggtacacggcggcatcgtcgacggcatcggcatggcgctgatggagatgattgccttcgacgaggacggcaactgtctgggcggatcgttgatggactacctgatcccgaccgcgctcgaggtgccacacctagagaccgggcacaccgtgaccccgtcgccgcatcacccgatcggcgccaagggcatcggtgagtcggccacggtgggttccccgccggcggtggtgaacgcggtggtggatgcgttggcgccgttcggggttcggcacgccgacatgccgttgacgccgtcgcgggtctgggaggccatgcagggccgggccacaccaccgatctag

SEQ ID NO: 64 - DNA, 222 bp, Mycobacterium Tuberculosis
gtgtcgggccgctgggaggccgggaatgcggacggtaacggtggctccgcggggttgatcggcagcggcggggccggcggcgacggcggtagcggcggggccaccggcgccggtggcgaaggtggcgatgctggagcaagcgggtccataaacggcaacgccggcgaccccggcaacagcggagaacgcggcgcagtgggcaagcccggcgcacccggctga

SEQ ID NO: 65 - DNA, 216 bp, Mycobacterium Tuberculosis
atgagtgtgtacaaggtgatcgacatcatcgggaccagccccacatcctgggaacaggcggcggcggaggcggtccagcgggcgcgggatagcgtcgatgacatccgcgtcgctcgggtcattgagcaggacatggccgtggacagcgccggcaagatcacctaccgcatcaagctcgaagtgtcgttcaagatgaggccggcgcaaccgcgctag

SEQ ID NO: 66 - DNA, 720 bp, Mycobacterium Tuberculosis
atgactgagcccagacctgtcttcgctgtcgtgatcagcgccggcctatccgccatcccgatggtcggcggcccgctacaaaccgtgttcgacgccatcgaggaacgcacccggcaccgcgccgagacaaccacgcgcgagatatgcgagagcgtcggcggcgcggacaccgtgttgagccgcattgacaaaaatcccgaactcgagccgcttctcagccaggcgatcgaggccgccactcgcaccagtatggaggccaagcgccggctcctcgcgcaagctgccgccgccgcgctcgaggatgaccagaaggtcgagccggcatcactcatcgtggccacgctttcccaacttgagcccgtgcatatccatgcactcgttcggctggccaaagccgccaagtcctcaccggaccaggacgagatccagcgacgcgaggtgatgagggcggcgagtaaggtcgagcccgtgccggtgctagcggccctcattcaaaccggcgtcgcgatcgcgacaacaaccgtttggcacggcaacggcaccgggactccggcagaagaaagcggccacatccttatccacgacgtcagcgacttcggccaccgcctgctggcctatctcagggccgccgacgcaggtgccgagctcctcatcctcccctctggagggtctgcgccaaccggcgaccacccgacgccgcacccgtccacgtcgagatga

SEQ ID NO: 67 - DNA, 393 bp, Mycobacterium Tuberculosis
gtgcgggcgctcggctggctacgagaggaccgcaagccgctgctgaatgccaaattgctcgtgctcggtcatctggctttgaacgtctacgaccccgataacggttacggcgaagaggtgttggactttgagccgcggacggtgtggtggggatcggccaattggaccgtgcgggccgggtcacacttggaagttggctttgcatgcgacgacccaaccctcgtcgaagaagctacagcgtttgtcgctgacgtgatcgcgttctccgaaccgatcgacacgacctgtgccggtcccgaaccgaacctcgtgcaggtggagttcgacgacgccgcgatggctgaggcgatggaggagatggccgagcccgatgatgacggggaggattggtag

SEQ ID NO: 68 - DNA, 642 bp, Mycobacterium Tuberculosis
atgggagtcattgcccgcgttgtcggtgtcgccgcgtgcggtttgtccctggccgtgctggccgccgcgcccaccgcgggcgcggaacccaccggcgcgctgcccccgatgacatccagcggcagcggaccggtcatcggcgacggtgacgccgcgctgcgacagcggatctcacagcagctgtttagcttcggagatcccaccgtccaggaggttgacggctcggacgcggctcaattcatcacggccgcagccgctgtcgcggaccgcgatgtggcgtcggtgttcttgccgctgcagcgggtgttgggctgccaacagaacacagccggctcgggggccggcttcggggcgcgcgcctaccggcgaaccgacgggcaatggggaggcgcgatgctggtcgtcgccaagagcaccgtttccgacgtcgacgccctcaaggcctgcgtcaagtccggttggcgcaaggccacggcgggcacgccgacttcgatgtgcaacaacggttggacctacccgccgttcgccgacacccgccgcggcgaagagggctatttcgtcttgctggccggcacggcctcggacttctgcagtgcgcccaacgcgaactaccgaaccaccgcgagctcatggccgggctag

SEQ ID NO: 69 - DNA, 4620 bp, Mycobacterium Tuberculosis
atgccggtgcgtgctgtcgccacgggcttccgggcgaccgccacccttaccggcgcatcgatcactgccgcgacagcggtctcggcaaccctggccaagaccggggtcggaaccggtatgaaggtcgccatcatcccgctgcgcgcaggagccaaggcactttccggcgagctgtcccgcgagacactcggccggaactgttggcgtggcgagcgtcgcgcctggatcgaagtgcgcggcttgcgcagcggaggcgacgacgaacttgggcgcgtcgtgctcaacgcaatccaagcccaccccggggtcgggtcggccagcctgaactacccgttgtcccgtgtcgtcgtcgctatcgacgatcccgacacatcactgcgcgaactttgccgcattgtcgatgacgccgaaaaagccgaaagacaccgccacccagatcaagccgccgatcagctggcgcaatcaccggggagcctgccgggcgacggcgtgctgctggcggtcagagctgtaacggtagccgccaccgcggccgggctgggcttagcgctcggcggccgggcgctgcgctggccccgatttccgctcgtcatcgaggcagcggtggcggccgtggaccaccagccgttgctgcgccgcctactcgaggatcgaataggcacggaggcgaccgccaccgtccttgagctggccatggccgccgcacacacggtcacgctgtcgccggcggcgttgtcggtggatctgacgatccaggcgctgaaagccgcggaatgccgtgccggagccagagcctggcgccggcatgaaccacagctcgcgctgcacgccgacgaaccggccgaccaaccccaatccctttggccgcgtcccgcacggtcgacgcaacctgtccaacgcagcgtcgcgcgtttcgcgctgatccaagcgctgagcgcggtgctcgtgggcgccgggacccgcgacgcggacatggccgcgaccgcgacgctggtggccacccccaaagccagccggaccacgccggaggcgttcgccgcggcgctcggccaaggtttggctgatcagcacgcggtgttgccgttacggccggagagtttgcgccgattggatcgggtcgatgcgatcgtcatcgacccccgcgtgctgtgcaccgatgacctgcgcgtggcgcgcatccgcggttgcggcgcagacgagctgtccacagcgtggaatcgggcgcaactcgttttgacggagagtggcctgcgcccaggctggcaccgagtacccggtgtctcggccagcggttcggattcggcagtcgaggcacttttccgccccatgcacgaccggctggcctccgcggtggttgccgaggcacatcgcaccggggcggacctggtttcggtcgatgtcgacgccctgggcgagttgcgaccggtgttcgacgacatccggcccctcgacgacggtgccagcgggtccctcgacgaagccctagcccgtgcggtggccgagctgcgccaggcgggccgcaccgtcgcggtgttgtcatcggttggtaagcaagcgctttcggctgccgatgtggcgcttggtgtgctgccaccacctggagccggtgcaccgccctggtacgcagatgtcctgctgcccgatcttggagccgcctggagggtgctgcacgcgattccggcggccagggccgcacgccagcgaggtaacgaaatttccggtggtgcatcggctttgggagccctgttgatgctgccaggggtccgcggactggggcccggcccggtgaccaccggcgcggcggccggactgctctcgggatacctgctggcacgcaaggtcgtcgacgcgcaagcaccgcgaccggcacccgctcatgaatggcacgcaatgtcggtcgagcaagtccgcaaagctttgccgtcgccggacgagcaggcaccggcgaaggcaccgccttcgccgtatccggcccgtgcgctggccggtggcctgcacacggcgaagcgcggcgcacaaataacccaggcacccttgaacgcgctttggcagttgaccaaggccatgcgcgcggagttgtcggacccgttgacgcctatgctggcgcttggtgcaatggccagtgcggtgttgggttcgccggtggacgcggtgatggtcggttcggtgctcaccggaaactctattctcgcggccagccagcggctgcgtgccgaaagtcggctgaatcgcttgttggctcagcagattccacccgccaggaaggtgctggccggcgcggacgaccagccgaggtacatcgaagtccgcgccgaggagctgcgtcccggcgacatcatcgaggtgcggacccacgaggtggttcccgccgacgcccgggtgattgaggaggtcgacgtggaggtcgacgagtccgcgctcaccggtgagtcgctgtcggtgaccaaacaagtcgaacccacgccgggtgtcgacctgatcgaacgtcgctgcatgctctatgccgggacgaccgtcgtgtccggcaccgcggtcgcggtggtgaccgcggtgggtcctgacactcaggagcgccgcgcggccgagctcgtgtccggtgatctgtccagcgtcggcctgcagcatcagctgagtcggctcaccaaccaggcctggccggtcagcatgaccggcggcgcactggtcaccgggcttgggctgttgcgccggcggggcctacgccaagcggtggccagcggtatcgcagtcacagtggccgcagtgccggaagggatgccgctggtggccacactggcccagcaggcatccgcgcgacggctaagtcacttcggtgcgctggtccgcatcccgcgctcggtggaggcgctcggccgtgtcgacatggtctgcttcgacaagaccggaacgctcagcgagaaccgtttgcgggtggcgcaggtgcggccggtggcggggcactcgcgcgaggaagtgctgcgctgcgcggcgcacgctgcgccggcgtcgaacggcccgcaggtgcacgccaccgacgtcgcgatcgtgcaagctgcggcagcggctgccgccagtggcaccgacggtgccgaacccggcgccgcagaacccgccgcccacctgccatttcgctccggtaggtcgttttccgcctcggtgtccggcaccgagctgaccgtcaaaggtgcgcccgaagtggtgctggcggcgtgcgaaggcatcggctcgagcatggacgacgcggtcgctgaactggccgccaacggattgcgggtgatcgcggtggcccaccgccagctgaccgcgcaacaggcacagtcggtcgtggacgaccccgacgagatcgcgagattgtgccgcgacgagttgagtctggtggggtttcttgggttgtccgacaccccccgcgcccaggcggcggccctacttgcggacctgcacgagcacgatctggatatccggctgatcaccggtgatcacccgattaccgccgccgccatcgccgaggagctcggcatgcaagtgagccctgagcaggtcattagcggtgccgagtgggatgccctgtcacgcaaggaccaggagcgagcggtagccgagcgggtgatcttcgcccggatgacaccggagaacaaggtacagatcgtgcagacgctggaacacagcggccgggtgtgcgcaatggtcggcgacggctccaatgacgcggccgcgatccgcgccgccaccgtcggcatcggtgtcgtcgcccacggcagcgacccggcccgagtcgccgccgacctggtgttggtcgacggccggatagagtcattgctgcccgcaatcctggaaggacgccagctttggcagcgggtgcaagcggcagtgtctgtgctgctcggcggcaacgcgggcgaggtggcctttgccatcatcggcagcgctatcaccgggacctcgccgttgaacacccgtcagctgctgctggtgaacatgctgaccgacgcactgcccgcggcggcgctcgcggtcagcaagccaagcgacccggtaacgccggcaacccgcggtcccgatcaacgcgagctatggcgtgccgtcggtatccgcggggcgaccacggcggccgcggccaccgtggcctgggtgatggcggggttcaccggcttgccgcgccgcgcatccacggtggcgctggtggcgctggtggccgctcagttgggtcaaaccttggtggactcgcatgcctggctggttgtgctcaccgcactgggctcactggccgcgctggcaaccttgatcagcatccccgtcgtcagccagttgctcggctgcacccccctcgacccactcggctgggcgcaggcgacagcagccgcgactgctgcgaccgtcgccgtcgccgtgctgaaccgtgtgctgacgggtcgggacaaatcgggccagccgaacccgcaaccacccgagaccgatgcgctttcccgcgacgcgtcccccggtgcgccccccggacctcgacgacgccgacgcgccacagcacggcgtaaagctccagtaaaggcaccgtcagcaacaaggcaaacgacgaagccaaagggtccgccagcgcatcggtcctcgtcgacatacccccgacggtga

SEQ ID NO: 70 - DNA, 444 bp, Mycobacterium Tuberculosis
atgagtgtggtcggcgggacagttcgaaccgtggggcgaacggtgagtggtgcagcaacggcgaccacagcggccgcgggtgcggtgggtggcgccgccgtgagcggcatcgtcggcggtgtgaccggagccgccaaaggcattcagaaggggcttagcagcggcagcaagtcgaccgcggcagccgcgttggccatcggtgcgatcggtgtcgctggactcgtcgattggccgatcctgttggccgtgggcggcggagcgttgctattgcggaagctcaaccgcacccccgaggtggccgcaccgccggtgaaggcgaaacttgcgccggtgcccgacaagccggctgccgcaaaggaagcgccagccaaagcgagcaagacaacagccaggaagacgagcggtcgccgagcgggcaccgctgagctgcgcagcaccaactag

SEQ ID NO: 71 - DNA, 1131 bp, Mycobacterium Tuberculosis
ttgcctgcccgcaggtcggccgcccgaattgatttcgcaggctcaccgcggcccaccctcggtgtggagtgggagttcgcgctcgttgactcgcagacccgcgatctgagcaatgaagccaccgcggttatcgccgaaatcggcgaaaacccgcgggtccacaaggaattgctgcgcaacaccgtagagattgtcagcggtatctgcgaatgtaccgccgaggcaatgcaggatctgcgcgataccctgggccccgcccgtcagatcgtgcgcgaccgcgggatggagctgttctgcgcgggtacccaccccttcgcgcggtggtcggcccagaagctcaccgacgcgccgcggtacgcggagctgatcaaacgcacccagtggtggggccggcagatgctgatctggggtgtacacgtgcatgtcgggattcgctcggcgcacaaagtgatgccgatcatgacgtcgctgctcaactactacccgcatctgttggcgctctcggcctcatcaccctggtggggtggcgaagacaccgggtatgccagcaaccgggcgatgatgttccagcagttgcccaccgccgggctgccgtttcactttcagaggtgggcggagttcgaaggtttcgtgtacgaccagaagaagaccggcatcatcgaccatatggacgaaatccgttgggatataagaccctcaccccatctgggcaccctggaggtgcggatctgcgatggcgtgtccaacctacgagagctcggcgcgctggtcgcgctgacgcattgcctgatcgtcgatctggaccgccgcttggacgccggcgaaacgctaccgaccatgcctccctggcacgtccaggagaacaagtggcgtgccgcccgctacggcctggacgcggtgatcatcttggacgccgacagcaacgaacggctggttaccgatgacctcgcggatgtgctgacccggctggagccggtcgccaagtcgctgaactgtgccgacgagcttgccgcggtctccgatatctaccgcgatggcgcctcctaccagcggcagctgcgagtggcgcagcagcatgacggcgatttgcgcgcggtagttgacgcgctggttgccgagctggtgatttag

SEQ ID NO: 72 - DNA, 2187 bp, Mycobacterium Tuberculosis
gtgacccacccggacccggcccgccaactcacccttaccgcccggctgaacacctcggccgtcgactcacgccgcggcgtcgttcggttgcaccccaatgccattgctgcccttggcatccgcgagtgggacgcggtgtcgctgaccggctctcggacaaccgccgcggtcgccggcctggccgcggcagacaccgcggtcgggacggtgctgctcgatgacgtcacactgtccaatgcgggccttcgcgaaggcaccgaggtgatcgtcagcccggtcaccgtctacggagcgcgatcggtgacgctgagcggttcaacgctggccacccagtcggtgccgccggtcacgctgcggcaggccctactcggcaaggtgatgaccgtcggtgacgcggtctcgctgctgccccgcgatctaggccccggcacatccacgtcggctgccagccgcgcattggcagctgcggtcgggatcagttggacctcggagctgctgaccgttaccggcgtcgaccccgacgggccggtcagcgtgcagcccaactcgctggtcacctggggcgctggggtcccggccgcaatgggtacgtccacggccgggcaagtgagcatctcgagtccggagatccagatcgaagagctcaagggcgcccagccgcaggctgccaagctcaccgaatggctcaagcttgccctcgatgagccgcacctactacagaccttgggcgccggcaccaatttgggtgtgctggtgtcgggtccggccggggtgggcaaggcgacgctggtgcgcgcggtgtgcgacggccgaaggttggtgacactggatggtccggagattggagctctggccgccggagaccgggtcaaagccgtggcctcggcagtgcaggcggttcgccatgagggcggtgtgttgctgatcaccgatgccgacgccctgctgccagccgccgccgagccggtagcctcgctgatcctgtccgagctgcgtaccgcggtggccaccgccggtgtggtattgatcgccacctcagcacggcccgatcaactcgatgcccggctgcgttcccccgagttgtgcgaccgggagcttggcctgccgctgcccgacgcggccacccgcaaatcgctgctggaggcgctgctgaatccggttcctaccggagacctcaacctcgacgaaatcgcctcccgcacaccgggtttcgtcgtggccgacctggctgcgctggttcgcgaggcggcgctgcgggcagcgtctcgagccagtgccgacggccgaccaccgatgctgcaccaagacgacctcctcggtgcgttgaccgtcatccggccgctgtcccgctcggccagcgacgaagtcaccgtgggtgacgtgacgctcgacgatgtcggtgacatggccgcggccaaacaagcactgaccgaggcggtgctgtggccgctgcagcaccccgacaccttcgctcggctaggtgtcgaaccgccgcgcggggtgttgctgtacggcccgcccggctgcggcaagacctttgtggttcgtgccctggccagcaccggacagttgagcgtgcatgccgtcaaagggtcggagctgatggacaagtgggtgggctcctcggagaaggcagtccgcgagctattccggcgggcccgcgactccgcgccgtcactggtgttcctcgacgagctggacgctctggcgccacggcgcggtcagagcttcgactcgggcgtctccgaccgggtggtggccgcgctgctgactgagctcgacggtattgacccgctgcgggatgtcgtcatgctaggcgcgaccaaccggcccgatctgatagacccggcgctgctgcgcccggggcggctagaacggctggtgttcgttgaaccgcccgacgctgccgctcgccgcgaaatcctgcgcaccgctggcaagtcgatcccgctgagctccgacgtcgacctggacgaggtggcagccggactcgacggttatagtgccgccgactgtgtggcgctgctgcgcgaagccgcgcttaccgcgatgcggcgttccatcgatgccgccaacgtcaccgccgccgacctggcgaccgcgcgagaaaccgtgcgcgcgtcgctggatccgctgcaggtggcgtcgctgcgtaagttcggcaccaagggtgaccttcggtcctag

SEQ ID NO: 73 - DNA, 447 bp, Mycobacterium Tuberculosis
atgtctcggctgagttccatcctgcgtgccggcgcggcatttctggttctcggcatcgccgctgcgacatttccacaaagcgcggcagccgactccacggaagactttccaatacctcgccggatgatcgcaaccacctgcgacgccgaacaatatctggcggcggtgcgggataccagtccggtgtactaccagcggtacatgatcgacttcaacaaccatgcaaaccttcagcaagcgacgatcaacaaggcgcactggttcttctcgctgtcaccggcggagcgccgagactactccgaacacttttacaatggcgatccgctgacgtttgcctgggtcaatcacatgaaaatcttcttcaacaacaagggcgtcgtcgctaaagggaccgaggtgtgcaatggatacccagccggcgacatgtcggtgtggaactgggcctaa

SEQ ID NO: 74 - DNA, 915 bp, Mycobacterium Tuberculosis
atgccgacacccgatttccagacgctgctgtacacgacggccgggccggtggccaccatcacgctcaaccgcccggaacagctcaacaccatcgtcccgcccatgcccgacgagatcgaggccgctatcgggttggccgagcgcgaccaggacatcaaggtcatcgtgctgcgcggtgccggccgcgccttctccggcggttacgacttcggcggcggcttccagcattggggcgatgccatgatgaccgacggccgatgggatccgggcaaggatttcgccatggtcaccgcgcgggagaccggaccgacgcagaaattcatggccatctggcgggcgtccaaaccggtgatcgcgcaagtgcatggttggtgcgtcggcggggccagcgactacgcgctgtgtgccgacattgtgatcgccagcgaggacgccgtgatcgggactccgtatagccgcatgtggggagcctatttgaccgggatgtggctgtatcgactcagccttgccaaggtcaaatggcactcgctgacgggccggccgctgaccggtgtgcaggccgccgaagccgagctgatcaacgaggcggtgccgttcgagcggctcgaggctcgcgtcgccgagatcgccaccgagctggcacgaatcccgttgtcacagttgcaagcccagaaactgatcgtcaaccaggcctacgagaacatgggcctggcctccacccagctgctgggcggcattctcgacgggctgatgcgcaacacccccgacgcgctcgagttcatccggaccgcccaaacccagggtgtgcgagccgcggtcgagcgccgcgacggcccgttcggcgactacagccaagccccaccggaactgcgacccgaccccacgcacgtcatcactcctgatgggagcatgtag

SEQ ID NO: 75 - DNA, 861 bp, Mycobacterium Tuberculosis
gtgagcgatgcgatccagcgggtaggggttgtcggggccgggcagatggggtccggcatcgccgaggtctcggctcgcgccggcgtcgaagtgacggtgttcgagccggccgaggcgttgatcaccgcgggacgcaaccgcatcgtgaagtcgctggagcgggccgtcagcgccggcaaggtaaccgagcgcgagcgtgaccgcgccctcggcctgttgaccttcaccaccgacctcaacgacctatccgataggcaactggtgatcgaggccgttgtcgaggacgaggccgtcaagtccgagatcttcgccgagctcgaccgggtcgtcaccgatccggacgcggtgctggcgtcgaatacctccagcatcccgatcatgaaggtcgccgcggccaccaagcagccgcaacgggttcttggcctgcatttcttcaatccggtcccggtgctgccgctggtcgagttggtgcgcacgctggtcaccgacgaagccgccgccgcgcgcacggaggagtttgccagtactgtgctgggcaaacaggtcgtgcgttgctccgaccgctccggattcgtggtcaatgcgctcctggtgccgtatttgctgtcggcgattcggatggtcgaggccgggtttgccaccgtcgaagatgtcgacaaggccgttgttgcggggttatcgcacccgatgggtccgctgcggctttccgatcttgtcggcctagacaccctcaagctgatcgcggacaagatgttcgaagaattcaaagaaccgcactacgggccccctccgctgttgctgcgtatggttgaggcgggccagttgggaaagaaatcgggtcgaggtttctacacgtactga

SEQ ID NO: 76 - DNA, 447 bp, Mycobacterium Tuberculosis
atgaaagccctggtggccgtgtcggcggtggccgtcgtcgcactgctcggtgtatcttccgcccaagctgatcccgaggcggatcccggcgcaggtgaggccaactatggtggccccccaagttccccacgtcttgtcgatcacaccgaatgggcgcagtggggaagtctgcccagcctccgggtctacccgtcccaagttgggcgtacagcctcccgccgcctcgggatggccgctgccgacgcggcctgggccgaggttctcgcgctgtcaccggaggccgacactgccggcatgcgcgcgcagttcatctgccactggcagtacgccgaaatcagacaacccggcaaacccagctggaacctcgagccgtggcggccggtcgtcgacgactcggagatgttggcttccggctgcaatccgggcagccctgaagagtcgttttag

SEQ ID NO: 77 - DNA, 1110 bp, Mycobacterium Tuberculosis
atgaaacggagcggtgtcggttcgctctttgccggtgcgcatattgccgaggcggtcccgttggcgccgctgaccactttgcgtgtgggcccgatcgcccgacgtgtcatcacttgcaccagcgccgaacaggtggtggctgcgctgcggcacctggattcggcggccaagaccggagctgaccgcccgctggtgtttgctggtggctccaatttggtgatcgccgagaacctgaccgacctgaccgtggtgcggttggccaatagcggcatcaccatcgacggtaacttggtgcgggccgaggccggtgcggtcttcgatgacgtggtggttagggccatcgaacagggtctgggcggactggaatgcctgtctggcatcccaggatcggccggggcgacacccgtgcagaacgtgggggcgtatggcgcggaggtgtctgacaccatcactcgggttcggcttttggatcggtgcacgggtgaggtgcgttgggtatccgcgcgcgacctgcgcttcggctatcgcacgagcgtgctcaaacacgctgatgggcttgcggtgcccaccgtggtcttggaggtggagtttgcgctggatccgtcgggccgcagcgcaccgctgcgctacggcgagctgatcgccgcgctgaatgcgaccagcggcgagcgcgccgacccgcaagcggtccgcgaagcggtgctggccctgcgggcacgcaagggcatggtgctggacccgaccgaccatgacacctggagcgtgggatcgttcttcacaaacccggtggtcacccaggatgtttacgaacggctggccggtgacgcggccaccagaaaggacggtccggtcccgcactatcccgcgcccgacggcgtcaagctggccgccggctggctggtggaacgggccggcttcggcaagggctatccggatgccggcgccgccccatgccggctttccaccaaacatgcgctggcgctgacaaatcgtggcggggccaccgccgaagatgtggtgacgctggcgcgcgccgtgcgcgatggggtccatgatgtgtttggtatcacactaaaacccgaacccgtgctgatcggctgcatgttgtag

SEQ ID NO: 78 - DNA, 1356 bp, Mycobacterium Tuberculosis
gtggtcattcgtgtgctgtttcgcccggtatctttgatacccgtgaataactccagcaccccccagagtcaggggccgatcagtcggcgtctggcgttgacggcccttgggtttggggtgttggcaccgaacgttctggtcgcgtgcgccggcaaagtgaccaagctggccgagaagaggccgccaccggcgcctcgtctgactttccggcctgccgactctgccgccgacgtggtgccgatcgcgccgatcagcgtcgaggtcggtgacggctggtttcagcgggtcgcgctgaccaattcggcaggcaaggtcgtcgccggggcatacagccgggatcgcaccatctacacgatcaccgagccgctgggctacgacacgacctacacctggagcggttcggccgtcggccatgacggcaaggcggttccggtggcgggcaagttcaccaccgtggcacccgtcaagacgatcaacgcgggattccagctcgccgacggccagaccgtcgggatcgcggcgccggtgattattcagttcgattcaccgatcagcgacaaggccgccgtcgagcgggcactaaccgtgaccaccgacccgcctgtcgagggcggctgggcctggctgcccgacgaggcgcagggcgctcgcgtgcactggcgtcctcgggagtactacccggcgggtaccaccgtcgacgtcgacgccaagctgtatgggctgccgttcggcgacggcgcgtacggcgcgcaggatatgtcgttgcacttccagatcggtcgtcgtcaggtggtcaaggccgaagtctcgtcgcaccgcatccaagtcgtcaccgatgccggcgtcatcatggacttcccgtgcagctacggcgaggccgacttggcgcgcaacgtcacccgcaacggcatccacgtcgtcaccgagaaatactcggacttctacatgtccaacccggccgccggttacagccatatccacgaacgttgggcggtgcggatttccaacaacggcgagttcatccatgccaaccctatgagcgccggtgcccagggcaacagcaatgtcaccaacggctgtatcaacctgtcgacggagaacgccgaacagtactaccgcagcgcggtctacggtgacccggttgaggtgaccggcagttcgatccagctgtcctacgccgacggtgacatctgggactgggcggtggactgggacacctgggtgtcgatgtcggcgctaccgccaccggcggccaaaccggcggcgacgcaaatcccggtcaccgccccggtcacgccgtcggatgcccccaccccgtccggcacacccacgactactaacggaccgggtgggtag

SEQ ID NO: 79 - DNA, 552 bp, Mycobacterium Tuberculosis
gtgacttcctccttgccgaccgtgcaacgtgtgatccagaatgcgctcgaggtcagccagctgaagtactcccaacacccccgcccgggcggggcgccgcccgcgctgatcgtcgagctgccgggcgaacgcaagctcaagatcaacaccatcctgagcgtcggcgagcattcggtgcgtgtcgaggcgttcgtgtgtcgcaagcctgacgagaaccgcgaagacgtataccggttcctgctgcggcgcaaccgccgcctgtatggggtcgcgtacacgctggacaatgtcggcgacatctacctggtgggccagatggcgctgtccgcagtggacgccgacgaggttgaccgggtgttggggcaggtgttagaggtggtggattcggacttcaatgcgttgttggagttgggatttcggtcgtcgattcaacgagagtggcagtggcggttatctcgcggtgagtcgctgcagaacctgcaggccttcgctcacttacgcccgacgacgatgcagagcgcgcagcgcgatgagaaggagttgggcggttag

SEQ ID NO: 80 - DNA, 729 bp, Mycobacterium Tuberculosis
ttggttgagccaatgaaccagtcaagtgtctttcagccgccggatcggcagcgggtggatgagcggatcgcgacgacgatcgccgacgccatcctcgacggcgtcttcccgccgggctcgaccctgccgcccgagcgagacctggcagagcggctcggtgtcaaccgcacctcgctacgccagggtctggcgcgactgcaacagatgggcctgatcgaggtgcggcacggcagcggcagtgtggtccgtgaccccgaggggctcacccatcccgcggtggtcgaggcgctggtgcgcaaactgggccccgacttcctcgtcgagttgctggagatccgcgcggcgttaggcccgttgattggccgcctggcggccgcccggagcacgcccgaggatgccgaggcgttgtgtgcggcgctggaagtggtgcaacaggcggacacggccgcggcgcggcaggcagccgatcttgcctacttccgggtgctcatccacagcactcgcaaccgcgcattggggttgctctaccgctgggtggagcacgccttcggcggccgcgagcatgcgctcaccggggcctacgacgacgcggacccagtgttgaccgacctgcgggcgatcaacggggcggtgctggccggtgacccggcggccgctgccgcgaccgtcgaggcgtatctgaacgccagtgcgctgcgcatggtcaagtcctaccgcgaccgcgcttag

SEQ ID NO: 81 - DNA, 2907 bp, Mycobacterium Tuberculosis
atgagcgaaagacacgccgcactgacgtcactgccgcccattctgccgcggctgatccgccggtttgcggtggtgatcgtcctgctctggctgggcttcaccgcctttgtcaatctcgccgtaccgcaactggaagtggtcggaaaagcacactcggtatcgatgagccccagcgacgccgcatcgattcaggcgatcaagcgcgttggtcaggtgttcggtgagtttgattccgataacgcggtaacgatcgtgctggaaggcgaccagccactcggtggggacgcgcaccggttctatagcgatctgatgcggaagctttccgccgatacccgccatgtcgcgcacatccaggacttctggggggatccgctgacagcggcgggatcccaaagtgcggatgatcgggccgcctacgtcgtggtgtacctcgtcggtaacaacgaaaccgaagcgtatgactcggtccacgcggtgcggcacatggtggacaccacaccgccaccgcacggggtgaaggcctatgtcaccggtccggcagcactcaatgccgaccaggccgaggccggagacaaaagtatcgctaaggtcaccgcgatcacgagcatggtgatcgcagcaatgttgctagtgatctatcgctccgtaattaccgcggttctcgtcttgatcatggtcggcatcgacctcggcgcaatccgcggattcatcgccttgctcgccgaccacaacattttcagcctttcaacatttgcgaccaacctgctcgttctcatggcgattgcggcgagcacggactacgcgatattcatgctcggccgttaccacgaatcgcgctacgccggcgaggatcgggaaacggccttctacacgatgtttcacgggaccgcccacgtgatcttgggttcgggtttgaccattgccggcgccatgtattgcctcagctttgcccggcttccgtattttgaaacgctcggcgcgcccattgctatcggcatgctggtcgcggtcttggcggcgctcacgctcggcccggccgtactgaccgtgggcagcttcttcaagctgttcgatcccaagcggcggatgaacactcggcggtggcgccgggtgggaacggcaattgtgcgttggccggggccggtgctcgcggcgacatgcttggtcgcctccattggcttgctggccttgcccagttaccggacaacgtatgatctgcgcaagttcatgcccgccagcatgccgtccaatgtgggggatgcggcggctggtcgacgcttttcacgggctcggctgaaccctgaggtgctgttgatcgagactgaccacgatatgcgtaatccggtggacatgctggtgttggacaaggtagccaaaaatatctaccacagtcccggtattgaacaagtgaaagcgataacccggcccttgggaacaaccatcaagcacacttcgataccgttcatcatcagcatgcagggcgtgaatagtagcgagcaaatggaattcatgaaggaccgaattgatgacatactggtgcaggtggccgcgatgaatacctccatcgagacgatgcatcgcatgtatgcactcatgggcgaggtcattgacaacaccgtcgacatggatcatctcacgcatgatatgtcggacataacggctacgctaagagatcatctcgcggatttcgaggatttcttccggcctattcgcagctacttctactgggaaaaacattgtttcgacgttccgctctgctggtcgataagatcgatattcgatatgtttgacagtgtggaccagctgagcgaaaagctcgagtacctggtcaaggatatggatattctgattacactgttgccgcagatgcgcgcgcagatgccgccgatgatatctgcgatgacgacgatgcgggacatgatgcttatctggcatggcacgcttggcgcgttctataagcaacaggagaggaataacaaggaccccggcgcgatgggccgggtttttgacgccgcccagatcgatgattcgttctatctgccgcagtcggcttttgagaatccggatttcaagcgggggctgaagatgtttttgtctccggacggcaaggcagcccgctttgtcattgctctggagggagatcccgcaacgcccgagggcatctctcgggtcgagccgatcaagcgggaggctagagaggccataaagggaactccattgcagggcgctgcgatctatctgggtggcaccgcggcgacgttcaaggatattcgagagggcgccagatacgatctgctgatcgccggagtggcggcgataagcttgattttgatcatcatgatgatcatcacccgaagtgtggtagccgcagtggttatcgtgggtaccgtcgtgctttccatgggcgcctctttcgggctttccgtattggtctggcaggacattctgggtatcgagttgtactggatggtgttggcgatgtcggtgatcctgctcctggcggtgggatccgactacaatctgctgctgatttcccggttgaaagaggaaattggggccggattgaacaccggaattatccgtgccatggctggtaccgggggagtggtgacggctgccggcatggtgttcgccgttaccatgtcgttgtttgtgttcagcgatttgcgaattattggtcagatcggtaccaccatcggcctgggcttgctgttcgacaccctcgtcgtgcgctcgttcatgacaccgtccattgctgcgctgctgggacgctggttctggtggccgctacgggtgcgcccgcgcccggccagtcagatgcttcggccgttcgcgccgcgccgattggttcgcgccttgttgctgccgtccggccagcacccgtcagcgactggcgcccatgagtag

SEQ ID NO: 82 - DNA, 990 bp, Mycobacterium Tuberculosis
atgagcatgagttcctatccgcggcagcgaccgcgccggctccgctccaccgtcgcgatgcgccgtctggttgcgcaaacctcgttggagccaaggcatttggtgctgccgatgttcgttgccgacggcattgacgagccgcggccgattacctccatgccgggcgtggtacagcacacccgggattcgctacgtagggccgcggcagccgcggtggccgccggcgtgggtgggctgatgcttttcggcgtgccgcgcgaccaggacaaggacggtgtcggttcggcgggcatcgaccccgacgggatcctcaacgtcgcccttcgcgatctggccaaggacctgggtgaggccacggtgttgatggccgacacctgtctggacgagttcaccgaccacgggcactgcggtgtgctcgatgaccggggccgggtcgataacgacgccaccgtggcccgctatgtggaactggctgtggcgcaagcggaatcgggcgcccacgtggtcggacccagtgggatgatggatggccaggtagccgcgatccgggacggtttggacgccgccggctacatcgatgtggtgatcttggcctacgccgcgaagtttgcttcggcgttctacggcccgttccgcgaggcggtgagctctagcctgtccggggatcggcgcacctaccagcaggagccgggcaacgccgccgaggcgctgcgtgagatcgagctcgatctcgacgaaggcgccgacattgtgatggtcaaacccgcgatgggctacctcgatgtggtggcggccgcggcggacgtctcgccggtcccggtggccgcctatcaggtctcgggagagtacgcgatgattcgtgcggcggcggccaataattggatcgatgagcgtgccgcggtgctagagtcgctgaccggtatccggcgtgccggcgccgacatcgtgctcacctactgggcggtagacgcggcgggctggcttacgtga

SEQ ID NO: 83 - DNA, 609 bp, Mycobacterium Tuberculosis
atgcccgaggaaacccaagtccacgtggtgcgccacggtgaggtgcacaaccctaccggcatcctgtacgggcggctgcccggattccacctgtccgcaaccggcgcggcgcaggccgccgccgtcgccgacgcgctggccgaccgcgacatcgtcgcggtaatcgcatcgcccttgcagcgtgcccaggagaccgccgcgcccatcgccgcccggcatgaccttgcggtggagacagacccggatctgatcgaatcggccaacttcttcgagggccgccgcgtcggccccggtgacggggcatggcgcgacccgcgggtgtggtggcagctgcgtaacccgttcaccccgtcgtggggtgagccttacgtggatatcgctgcccgaatgacgaccgcggtggacaaggcacgtgtccgcggcgccggccatgaggtggtgtgcgtcagccatcagctgccggtgtggacgctgcggctgtatctgaccggtaagcgcctctggcacgatccgcgccgtcgggactgcgcactggcctcggtgacgtcgttgatctacgacggcgaccgcctggttgacgtggtgtattcgcagccggcggcgctttga

SEQ ID NO: 84 - DNA, 651 bp, Mycobacterium Tuberculosis
atgcagagcagagcgaccagaaggagcggcgctttgaccatgcgccggctggtgatcgccgcagcggtatcggcattgctgctcaccggctgttccgggcgcgacgccgtcgcccaaggcggcacgttcgaattcgtctcgcccggcggaaagaccgacatcttctacgatccgcctgccagccgcggccgcccgggcccactgtctgggccggagctggcggatccggcgcgcagtgtgtcgctggacgacttccctgggcaggtcgtcgtcgtcaacgtgtgggggcaatggtgtgggccgtgccgggccgaggtcagccaactacagcgggtgtatgacgccacccgaggtgcgggtgtgtcgttcctcgggatcgacgtgcgcgacaacaaccgccaggcgccccaggacttcatcaacgaccggcatgtgacgtacccgtcgatctatgacccggcgatgcgcaccttgatcgcattcggtggcaaataccccaccagcgtcattccgtccacgctggtgctggaccgtcagcaccgggtcgcggcggtgtttctgcgcgaattgctggctgcggacctgcagccggtggtcgagcgggtggccgaggaggagccgtcgggtcgggctccggtgggggcgcaatga

SEQ ID NO: 85 - DNA, 780 bp, Mycobacterium Tuberculosis
atgaccgggttcaccgagattgccgcggtggggccactgctggtggcggtgggggtatgtctgctggctggtctggtgtcgttcgcctcaccatgtgtggtgccgctggtgcccggctacctgtcgtatctggcggccgtcgttggggtggacgagcagctgccggccggcgtcgtcaaacccccggtggctgcccgctggcgggtcgccggatcggcggcgctgttcgtggcggggttcacgacggtgttcgtgctgggcaccgtcgccgtcttgggcatgaccaccacgctgatcacgaatcagctgctgctgcagcgggtcggaggcgtgctgatcgtcgtcatgggcctggtgttcgtggggttcatcggagccctgcagcgccaggcgaggttcacgccgcgccagttgacgagcgtagcgggggcgccggtgcttggcgcggtgttcgcgctcggctggacaccgtgcctggggccgacgctgaccggggtgatcaccgttgcctcggccaccgagggtgccagcgtggcgcgtgggatcgtgctggtgattgcctattgcctggggctggggattccgttcgtgcttttggcgttcggttcggcgtgggcggtggcgggcctgggctggctgcgccggcacaccagggccatccagatcttcggcggggcgctgctgatcgcggtcggtgccgcgctggtcaccggggtgtggaacgacgtcgtgtcgtggctgcgcgacgccttcgtttccgacgtgaggttgccgatttga

SEQ ID NO: 86 - DNA, 1218 bp, Mycobacterium Tuberculosis
gtgctggtgaccgagcatccgaggacgggcgtgggagcccccgatagcggcaacggcggcacggatcatccgaccgtgcagttgccgcccgtgccatccgtgggggcaccaccggctgcggccggtggtgaaacaccgactaggtcagttgcgggattccgcacccagcggctcgacccgacggcctacggcgcctactacagcggccccgatgagggcccggccagcccggctgaaaggccgccgtatcgtctcgagccggtgccccatacgccgtatccggaactggccaccaccacgctgctgaggccggtcaagccgccaccgtcggaaggctggcgtcggttgctctatctgctgtcgggtcggctgatcaacgccggggaaggccctcgggccgcgcacctcaacgacctggtcgctcaggtcaaccgcccgctgcgcggctgctaccggatcgcggtgttgtcgttgaaagggggtgtcggcaagaccacgatcaccgcgaccctgggggccacctttgccgacctgcgcggtgaccgggttgtcgcggtcgacgccaatcccgaccgcggcacactgagccaaaaggtcccgctcgagacgccggccacggtgcggcacctgctgcgcgacgccgacggcatcgagcgctacagcgacgttcgcggctacacatcgaagggacccagcgggctggaagtgctggcatcggacagtgatccggcctcctcggacgcattcagcgccgacgactacacccgcaccctggacattctggagcggttctacggcctggtgctcaccgactgcggtaccgggttgctgcactcggcgatgtcggcggttctgcctaggtccgacgtactggtcgtggtcagctcggggtccatcgacggcgcccgcagcgccgcggcgacgctggactggctgcaggcccacggccacgacgaccaggtgcgcaactcgatcgccgtcgtcaacgcggtgcggccgcgcgcgggcaaggtcgacgtgggcaaggtcgtcgagcacttctccaggcgttgccgtgcggtgcgcgtggtgccgttcgacccacacctcgaagaaggcgccgaaatcgcgctggatcggttgcggcgggagacccgcgaagcgctcaccgaactggcagcggtggtggccgctggattccccggcgacccgcggcgctgcaaaccgagcttcacctag

SEQ ID NO: 87 - DNA, 303 bp, Mycobacterium Tuberculosis
gtgaaccggtttctcacctcgatcgtcgcgtggttgcgcgcgggatatcccgagggcattccgccgaccgactcctttgcggtgctcgccctgctttgccgccggctgagccacgatgaggtcaaggcggtggctaacgaactgatgcgactcggtgacttcgaccagatcgacatcggcgtggtgatcacccatttcaccgacgagttgccgtcaccggaggatgttgagcgcgtccgggcgcggttggccgcccagggatggccactcgatgacgtccgcgaccgcgaggagcacgcatag

SEQ ID NO: 88 - DNA, 945 bp, Mycobacterium Tuberculosis
gtggtggctccagccggcgaacaaggacggagttcaacagccttgagtgacaacccttttgatgccaaggcgtggcggctcgtggacgggttcgacgatctgaccgacatcacctaccaccgccacgtcgacgatgccacggtgcgggtggcgttcaaccgccctgaagtgcgcaacgcatttcgcccgcacaccgtcgacgagctgtaccgggtgctcgaccatgcacgaatgtcgcccgacgtcggagtggtgctgctgaccggcaacgggccgtccccgaaggacggcggctgggcgttctgctccggcggcgaccaacgaattcgtgggcgcagcggttaccagtacgccagcggagacaccgcggacacggttgatgtcgcccgcgccggccggttgcacatcctggaggtgcagcggctgatccggttcatgcccaaggtggtcatttgtctggtcaatggctgggcggccggcgggggacacagcctgcacgtggtctgcgatctcaccctggccagccgcgagtacgcccgcttcaagcagaccgacgccgacgtcggcagcttcgatggcggttacggcagcgcatatctggcccgtcaggtcggccagaagtttgcccgcgagatcttcttcctaggccgcacctacaccgccgagcagatgcaccagatgggcgcggtcaacgcggtggccgaacacgccgagctggagacagtggggctgcagtgggcggccgagatcaacgcgaaatcgcctcaggcgcaacggatgctgaagttcgcgttcaacctgctcgacgacgggctggtgggtcagcaactgtttgccggtgaggccacccgcctggcctacatgaccgacgaggccgtcgaaggccgcgacgccttcctacagaagcgtccccccgactggagcccgtttccgcgctatttctaa

SEQ ID NO: 89 - DNA, 705 bp, Mycobacterium Tuberculosis
atgagtcgcgccgccttggacaaggatccccgcgacgtggcgtcgatgttcgatggcgtcgcccgcaagtatgacctgaccaataccgtgttgtccctgggccaggaccggtattggcggcgagccactcggtcggcgctgcggatcgggcccggccaaaaggtcctggacctggccgcgggcaccgccgtgtccaccgtagagctcaccaaatcgggcgcgtggtgtgtggctgccgatttttcggtcggcatgcttgcggcgggcgctgcgcgcaaggttcccaaggtcgccggtgacgccacccggctgccgtttggtgacgacgtgttcgatgcggtcaccatcagtttcgggctgcgtaacgtcgcaaaccagcaagcggcgctgcgggaaatggctcgtgtcacccggccgggcgggcggctactagtgtgcgaattctccacgcccaccaatgcgttgttcgccaccgcctacaaggaatacttgatgcgggcgctgccccgggtggcgcgggcggtgtctagcaaccccgaggcctacgagtacctcgcggagtcgatcagggcctggcccgaccaggcggtgctggcgcaccagatttcgcgggccgggtggtcgggggtgcggtggcgcaacctgaccggcggcatcgtagctctgcatgccggatacaaacccggcaaacaaaccccgcagtga

SEQ ID NO: 90 - DNA, 1332 bp, Mycobacterium Tuberculosis
atgaagctctttgacgatcgtggcgacgctggacgccagttggcgcaacgcctggcgcagctatccggcaaggccgtcgtcgtccttggcttgccgcgcggcggggtaccggtggcctttgaggtcgccaagtcactgcaagcgccactcgacgtcctggtcgtgcgcaagcttggcgtgccgttccaacccgaattggctttcggcgccatcggtgaggacggcgtgcgggtgctcaacgacgacgtcgtccgcgggacacacctcgatgctgccgccatggacgcggtcgaacgcaagcagctgatcgagctacaacgccgcgcggaacgcttccgccgcgggcgtgaccgcatcccgttgaccgggcggatcgcggtgatcgtcgatgacggcatcgccaccggagcgacggccaaggcggcgtgccaggtcgcccgggcgcacggtgcggacaaggtggtgctggcggtcccgatcggcccagacgacatcgtggcgagattcgccgggtacgccgatgaggtggtgtgtttggcgacgccggcgttgttcttcgccgtcgggcagggttaccgcaacttcacccagacctccgacgacgaggtggtggcgtttctggatcgtgctcaccgcgacttcgccgaggcaggtgcgatcgatgccgccgctgacccaccgcttcgcgatgaggaggtccaggtcgttgccggtccagtaccggtggcagggcacctgactgtccccgaaaaacccaggggaattgtggttttcgcacatggcagtggcagcagccggcacagtatccgcaatcggtacgttgcagaggtcttgaccggggccgggtttgcgacgctgttattcgacttgctcacgcccgaagaagaacgcaaccgcgccaacgtcttcgacattgagctgctcgcttcccgactcatcgacgtgaccggttggttggccacccagcccgacaccgcatcgctgccggtcggctacttcggcgccagcacgggagcgggtgcggcgctggtcgcggccgccgatccgcgcgtgaacgtgcgggcggtggtgtcccgcggcggccggcccgatctcgcgggtgattcgctggggagcgtggtggcaccgacgctgctgatcgtgggtggacgcgaccaggtggtcctcgagctgaaccaacgagcgcaagcggtaatacccgggaaatgccaactcaccgtggtccccggcgccacacacctattcgaagaaccaggcacgctggaacaggttgccaagctggcgtgcgattggttcatcgaccacttgtgcggcccaggcccaagcggctaa

SEQ ID NO: 91 - DNA, 342 bp, Mycobacterium Tuberculosis
atgggtgagcacgccatcaagcggcacatgcggcaacggaagcctacgaagcatcccctagcccagaaacggggcgcgcggattctggtcttcaccgacgatccccgcaggagcgtcctcatagtgcccggttgccacctggattccatgcgccgagaaaagaacgcgtactacttccaggacggcaatgcgttggttgggatggttgtctcgggcggcacggttgagtacgacgccgacgaccgcacatatgtcgtgcagctcaccgacggaaggcacaccactgagtcatctttcgaacactcatcgccgagtcgatcacctcaatccgatgacctatga

SEQ ID NO: 92 - DNA, 1167 bp, Mycobacterium Tuberculosis
gtgaaagtagcgattagcggtgccggcgtggcaggagcggcgctcgcccactggctgcagcgcaccggccacaccccgacagtgatcgagcgggcgccgaagttccgcaccggcggctacatgatcgacttctggggcgtcggctaccaggtggccaaacgaatgggcatcacggaccagatcgcagcggcgggttaccacatggaacacgtccgctccgtcggtcccaccggcaaggtcaaagccgacctgggcgtcgacgtctttcgccgcatggtcggcgacgacttcaccagcttgccgcgcggcgatctcgccgccgcgatctacacgacgatcgaagaccaagtggaaacgatcttcgacgacagcatcgccaccatcgacgagcaccgcgacggcgtccggctcaccttcgaaaggaccgccccgcgcgatttcgacctggtcatcggtgccgacggactgcactccaacgtgcgccggctggtcttcgggccggagcgggatttcgagcactacctgggctgcaaggtcgcggcctgcgtggtcgacggctaccggccccgcgacgagcgcagctatgtcctctacaacaccgtcgaccgacagctggcgcggttcgcgctgcgcggcgaccgcaccatgttcttgttcgtcttccgcgccgaacacgacaaccccggcgtggcacccaaagatgagctgcgcgaccaattcggcgacgtgggctgggaaagccgggacattctggccgccctcgacgacgtcgaggacctgtacttcgacgtggtcagccaaatccggatggaccgctggtcacgcggtcgggtgctgctgatcggcgacgcggccgggtgcatctcgctgctcggcggcgagggcaccggcctggcgatcaccgaggcctacgtgctggccggggagctcgcccgcgccgggggcgaccaccgtcgcgccttcgacgcctacgagaagcgcctgcgtcccttcatcgagggcaagcaagccagtgcggcgaagttcatctggtttttcgccacccgaacccgattcggcctgtggtttcgcaacgttgcgatgcgcacgatgaacttcggcccgctggcgacgctgttcgccggcagcgtgcgtgacgacttcgagctgcccgactacacctggtga

SEQ ID NO: 93 - DNA, 1305 bp, Mycobacterium Tuberculosis
atgctggaagtcgcggcagagccaacccggcgccggctgctacagctcctggcaccgggtgaacgcaccgttacccagcttgcgtcgcagttcacggtcacccgttcggcgatatcgcagcacctcggcatgctcgccgaagcgggattggttaccgcccgcaaacagggccgggaacggtactaccggctcgatgagcgcggggtgctgcggcttcgtgcgctcatggagtccttctggagcgacgagctggaccgtcttgtcgccgatgccgcccactacccgccgtcacaaggagactgtgccatgccgttcgagaaagcggtcgtcgtgcccttggatccgaccagcaccttcgcgctcatcacccagcccgacaggcttcggcgctggatggccgtcgccgcgcgtatcgagctgcgcaccggtggcgcttatcgctggacggtgactccggggcatagcgcggccggcaccgtcatcgacgtcgaccccggcaagcgggtggtcttcacctggggttgggaggaccacggcgaccccccgccgggcgggtcgacggtgaccatcacgctgaccccggtcgacggcggcaccgaggtccggctggtccacgacgggctgaccgcgcagcaggccgcccggcacgccaaagggtggaaccacttcctggaccggctggtcgtcgccggccaacgcggtgacgccggtcccgacgaatgggccgcagcgcccgatccgctcgacgaattatcttgtgccgaagcaacattggccgttcttcagcacgtactgcgcgggataggcgcctctgacctgaccaggcagacaccgtgtacggaatatgacgtttcgcaactggcggatcatttgctgcgctcgctggcgatcatcggcgctgcggcgggcgcgcagctggcgccccgcgatgtggacgcgccactggaaacccaggtggccgacgcggcgcaggccgtgatggaagcctggcggcggcgtggcttggcgggcacggtggagctgaactcgaaccaggtgcctgcgacggtgccggtcggcatcctgtgcctagaatttctggtccacgcttgggatttcgcgattgccaccggttctcaggtgatcgcgtccgagccggtgtcggagtacgtactggcggtggccggcaaggtcatcaccccggcaacccgtaactccgcgggcttcgccgcgccggcggcggtcggttcctttgccccagtcctcgatcgcctcatcgccttcaccggccgccagccgaccgcaggccacgtgtccgccacctaa

SEQ ID NO: 94 - DNA, 2634 bp, Mycobacterium Tuberculosis
atgcgggcacgcaggttgcgcagagccctggccgcgctcttggcggtggcgggtctgtttgttccgttcattgttggcgtgcccacggcctacgacggtgagccggtgttcgtcgccattccggtcgagcatgtcaatacgctcatcggcaccggcacgggagccgcgatagtgggggagatcaacaactttcccggcgcctcggtgccgttcggcatggtgcagtactcgccggacaccgtcgacaactacgccggctacgactacgacaacccgcattccaccggattcagcatgacgcacgcgtcggtgggctgcccggcgttcggcgacatctcgatgttgcccacgaccaccccgctcggctcgcagccgtggagcgcctgggaggagatcgcccacgacgacaccgaggtcggcgtgcccggctactacaccgtacggttccccggtaccggggtgatcgccgagctcaccgccaccacccgcacgggcgtcggccggtttcgctacccccgcaatgggtggccggcgctgtttcacgtgcgctccggcgcatcgttggcgggcaactacgccgcgacactgcagatcgaggacaacaccacaatcaccggctcggcgaccagcggcgggttctgcggcaagaagaacctgtacacggtgtacttcgccatgaagttcagccagccgttcagctcgtatggcacctgggacggctacgcggtctatcccggttcacacagcatgaattcgagttacagcggggggtatgtcgggtttccggccggctcggtgctcgaggtgcggaccgccctgtcctatgtgagcgtggacggggcgcgagccaacctggacgccgaaggcggagcaagcttcgacgacatccgtgcggcgacatcgagcgaatggaacgccgcgctatcgcgaatcgcggtggccggcagggggcctggcgacgtggacaccttctacacttgtctttaccggtcactgttgcaccccaacacctttaacgacgtggacggacgttacatcggattcgacggtgtcatccacagcgttgccagtgggcacacccactacgccaatttctccgactgggacacctaccgcagcctcgccccactgcagggactgttgttcccgcaacgggccagcgacatgatccagtcgttggtgaccgacgcggagcagagtggtgcgtatccgcgttgggcgctggcgaattccgcaaccggcatgatgagcggagacagtgtggtaccgctcatcgtaaacctctacgccttcggcgccagggatttcgacctcaaatccgcgctgcactacatggtgaatgcagcgacccagggcggtgtcggacttgacggtttcctggagcggccgggaatcgccgcctatctgaggctcggctatggaccacaaacggcggaattccgcgccaacggtcgtatcgccggcgcctcggtcacgctggagtggtcggtcgatgactttgccatctcccgattcgctgattcgttgggcgataccgcaactgccgccgtcttccagaaccggtcgcagtattggcagaacctgttcaatcccaccaccggctatatctcgccccggagcgcggccggtttcttccccgacggtcccgggttcgtggcatacccctcgggctttgggcaggacggatacgacgagggcaacgccgaacaatacctgtggtgggtgccgcataacgtggccggtttggtgaccgcgcttggtggccgcacggccgtcgtcaagcggctcgaccgctttaccaaaaagctcaacgtcggccccaacgaaccctatctgtgggccggtaacgagcccggtttcggggtgccctggctgtacaactacatcggccaaccgtggaaaacccagcggacggtcgaccgggtccgcgggctgttcggcccgacacctggcggtgcgccgggcaacgacgacctcggcgccctgtccagctggtatgtctgggctgcccttggcctgtatccgagcaccccgggaaccaccatcctgaccgtgaacacaccgcttttcgatcgcgccgtgatcgcgctccccaccggaaagtccattcagatcaccgcgccgggcgcatccgggcggaaccgcctgaagtacatcgacggcctgaccatcgaccgccaaccgagcaaccagacgtttcttccggagtcgatcgtgcgcaccggaggcgacctgaccttctcgctcgccggcacacccaacaaggtctggggaaccgcggcgtctgccgcgccgccgtcattcggtgcgggcagctcggcggtgacggtaaatatcgcccggcccatcatcgggatcgtgccgggagcgaccgggaccgtgaccgtcgacgcgcaacggatgatcgacggcgtcgacgactacactgtcaccccaacgtcctacgttgttgggattgcggcggaaccgttatccgggcaattcgacgatgacggagccgtgagcgcgtcggtcgcgatcaccgtagctcgatcggtgccgtcggggtattacccgatctatgtcaccaccagcgccggggatagtgcccggacattgatcgtgctggtcgtggtcgccgaggcggtggaatga

SEQ ID NO: 95 - DNA, 798 bp, Mycobacterium Tuberculosis
atgaccacccacgccgtgatcatcacctatctccgcgaccagacgcagcccgccgtcgatgcgatcggcgggttctaccggacatgcgtactgactggcaaggcgctggttcggcggcccttccattggcgtgaggcgatcgagcagggctggttcattaccagcgtctcgttgctgccaaccctggcggtgtcgattccgttgaccgtgttgatcatcttcacgctcaatatcctgctggccgagttcggcgccgccgacatctccggcgccggcgcggcgctaggcgcggtcacccagctgggcccgctgaccaccgtgttggtgattgccggcgctggagccacagcgatctgcgccgacctgggtgcccgcaccatccgggaagagatcgatgcgatggaggtgctgggcatcgaccccatccaccggctggtggtgcctcgggtcgttgccgcgaccatcgtcgccgcactgcttaacggcgcggtgataaccattggcctggttggtggtttcgtcttcagtgtcttcatccaacacgtctcggccggcgcctacgtgggcacgctcaccttggtcaccggtctacccgaggtgatcatctcggtggtcaagtcggcgacgttcggcctgatcgctggcctagtcggctgttaccgcgggctgaccacgaaaggcggccccaagggagttggaaccgccgtcaacgaaaccctggtgctgtgcgtgatcgcgctgttcgcgaccaatgtggtgttgaccacgatcggcgtgcggttcgggacgggacactag

SEQ ID NO: 96 - DNA, 1236 bp, Mycobacterium Tuberculosis
atgggagtcgtcgaacgcgcgatcgcgccctcggtgctggccgcgctcgccgacaccccggtcgtcgttgtcaacggcgcgcgtcaggtcggcaaaacaacactggtcgcgcgacttgactatccgggatccagcgaagtcgtctcgcttgacgacgtcgccaaccgcgacgccgcccgcgacgatccccgcgcattcgtatcccggccggtggacacgctcgtcatcgacgaagcccagctcgagccggggctgtttcgggcgatcaaggcagaggtcgaccgggatcgcaggccgggcaggttcctgctcacgggttcagcgaggctgctctcggctcctgacatggccgacgcgctcgtcgggcgggtcgaaatcatcgaactctggccgttctcgcaaggtgagcgggccggaatcgcggacggtttcgtcgatgcgctgttcaccgcaccacgcgagctgatccacggctccgatatgcgccgcgccgatctggtcgacaggatcgccaccggaggcttcccggacatcgtcgcccgatcgccgtcgaggcgtcgcgcgtggttcgacaactatctcacgacggcgacgcagtcggtgatccgcgagatttcgccgatcgagcggcttgccgaaatgccgcgtgtgcttcggctctgcgccgcgcgtaccggcgccgagctcaacgtgagcgcactggcgaacgacctgtcgatcccggctcgcaccaccgctggctatctggccctgctggaagcggcgttccttatccaccgggtgccggcctggtcgaccaacctgagccgcaaggtgattcgccgaccgaaactggtggtctcggacagtggcctggcgtgtcacctgctcggcgttaccggtgcgacgctggatcgccccggccgtccactcggcccgctactggagactttcgtggcgaacgagattcgcaaacagctcacctggtcgaccgaacggccgagtctgtggcattttcgcgaccgcggcggcgccgaggtcgatctggtgctcgaacatcccgatggtcgggtctgcggcatcgaggtcaaggcgaccagcacgccgcgagccgaggacctgcgtggcctacgttatctggccgagcggctcgatgatcgatttcagttcggcgtgctgctcaccgccgcgccggaagccaccccgttcggcccaacgctcgcggcgttacccgttagcacgctctgggccggctaa

SEQ ID NO: 97 - DNA, 507 bp, Mycobacterium Tuberculosis
gtgccgatcactcccctgctgcacgagagcgtggcccgcttcgccgctactggagcggacatcaccacacgcgcggaaccggacctgttcgtctcgatcgatccggaccacctgcgccgaatcctcaccgccgtgctcgacaacgccatcacccacggggacggtgaaatcgctgtcaccgcgcacgcccgcgacggtgcagtcgacatcggcgtccgcgaccacggccccggattcgccgaccactttcttcccgtcgccttcgaccgattcacccgcgccgacaccgcccgcggcggtcgcggcagcggcctcggcctggccatcgtcgccgccctcaccaccacccacggcggacatgccaacgccaccaaccaccccgacggcggggccgaactccgcatcaccctccccacaccgcggccgcccttccacgaggagcttccgcggatcacgtcatcagatacaaaggacccgaatcgggagcacgacactagcgaccaatag

SEQ ID NO: 98 - DNA, 609 bp, Mycobacterium Tuberculosis
gtggcgtgctgtaggaacagaggtatgaatctcgcggcgtgggccgagcgcaatggcgtcgcgcgggtgaccgcgtatcgctggttccacgctgggctcttgccggtcccggcccggaaggttggtcgactcattctggtcgacgagctggctagcgaggctggcgcgcagccaaagactgcggtgtacgcgcgggtgtcgtcggctgatcagaagtctgatttggatcggcaggtggcgcgggtgacttcgtgggccacagccgaacagatcccggtcgacaaggttgtcaccgaggtcgggtcggtgctcaacgggcaccgacgtaagttccctgcggtgctgcgcgatctgtcggtcacgcggattgtggttgagcatcgggatcggttctgccggttcggttcggagtatgtccacgctgcgctggccgctcagggtcgggagttggtcgtggtggactcggccgaggttgacgatgacctggtatgggatatgaccgagattctgacctcgatgtgcgcaaggttgtatggcaaacgtgctgctcagaaccgggccaagcgggccgtcgcggctgccgctgtcgatgatcatgaggcggcctga

SEQ ID NO: 99 - DNA, 606 bp, Mycobacterium Tuberculosis
gtgttggggccgatccggcaaccgcgcctgacggtgcggccagggcggctgccggggatgatcgccggcgtggcggcgaaacgaatgaaccgcgaacagttcttccgcgcggcgtcggggctcgatgaggatcgcctacggaaggcgctgtggaacctctactggcgcggcaccgcaaacatgcgggagcgcatcgaggccgagctggccagcgccgggcgcgctcgcccggcgcgcaaaataaagccgccggccgatccggacatcgtgggttgggaggtcgacgagttcgtgtcactggcgcggtcgggtgcctacctgggcggggaccggcgggtgtcgccgcgggaacgatcgcgctggcgtttcaccttcaagcggctcgccgcggaagcccaggacgccctgcgagccgaggacgccgagcccgcggcatccgcactggagcaactgatcgacctggcgcgcgaggccgacgggtacgactacttccgctccgacgatccggtggcagcggcgggtttcgtcgtgtccgatgtggcggcggcgggccacccacacttccgtgagttcgccgccgagatcggtgcggcgatcccgccgtga

SEQ ID NO: 100 - DNA, 2568 bp, Mycobacterium Tuberculosis
gtggccgaagcgttcgatgcgacccaagccgtggcgagaatcctggccgaacatggcccattgagcgaggacgacatcgcacgacgcctgctggacagcggcgtggccgacccggacgccgtcctgcgcgcgcttcgccttgaaacggaatggccggcaaggcagttggtcgacgatcggtgggtgtggctgccgacgctgctagccgggcgggtattcacccatcggctcggcgcggacgaggcggtccacgacatgctcggcgtgaccccggacctggacccgatcaccacgctctgcgagcacgaggagtatggccggctggccgacggttcggcggcgcggatcgtgctggccggatacgacgaggagctgctcgaacgacggggcatcccggacgaggccatcgaccccggcggggcactgctgctggagccgggcacgctggcgacgttgggggccgccgcgggggatctggtcggtgtgcggctgaccgccgcagggctggtgctcgagcggatcggcacagccggtgcggacacctccgtcggcgcccggctggccgagctggtcgaccccgacgagcccgcgttcttccccgcggcggtctggacggcgtgcgtcgacgacccggcggcatttaccgagccagtggcaccgctgcgcgagatcctcgaccagcacggcctcacgcacgaagacgactggctagcacctggcggattcaatttcgacgcttggcgtttcgagaaccgatgcgaactgctggcctttcgccacgacctcgaccccaacgacgcggtcgcgctgtacacgctgatcaaactgcacgagacgatgtcgctgctgctcgaagcaaccgacccggacgagttgccgcgggatgtgctcgccacagccgccgagaccgcgacggaaaccggctccgactcgttggtcgatctgctcggcgacattggggcggcgctggccgacccgctgctggccgagctgctggtggcagagacggtgggcaccgactccggcggggcggccgcgctgggcctgctcaccgagatgctggagcccaaggtgccgcgcgcggcgcgggtggcggtgcgctggctgcgcgcggtcgcgctggaccggatcggtgatgtcgaggcggccgaacgtgagctgctggcggccgagtcgatggacaccgagtggccgctgccgttgctcgacctggcccgcatcgcctccgatcgcggcgacgccgagcgcgggttggcactgctgcgccgcgccggcaccgaacccgaccacccgctggtgcggctcctggagcggcaccgagcccagccgcgccgcgacctgggccgcaacgaggcgtgctggtgcgggtcgggccgcaagtacaagaaatgccatctcggccgtgaggcgctgccgctggccgagcgggtggactggctgtatgccaaggcatcccagcacgcactgtcgggcgactggaccggcctgctggccgaagtcagctatgagcgcttccggtatgccgactctgacgatgaggacgcgctggccgcggcgctggccgatccgctggtgctggacgcggtgttgttcgagggcggcgcgttcgcggagttcctcgaagtgcgcggttcgctgctacccgacgacgagcggctgcttgccgagcaatggctgctcgtggagcggtcggtgttcgaggtcgagcacgtgcaacctggcgagggcgtgatcgtgcgcgacgtacgcaccggcgacacccatgaggtgcatgagcgggcggccagccgccagctgcgagccgggcagctgatctgcgcgcgcccggtgcccgccggggacaccatggtgttcttcggcgggatcgagccggtcgcgctgcacgagcgtgccgtgctgatcgagctgctcgatgacgagcccgacccggtgacactggtggcccagctgagccgccggttcgcgccgccgacactggtcaacaccgagggcgactcgctggcaatctgcgaggccagcgtgcgagtcgacgatccggccgggatccagggcgcgctcgacggggtctacgaccgggttgacggcgaggagccgccgcggtggatcgaacacgtcaccaacgacggcatgctgcgggtccgggccacgctggtcctcgacggtgacacgctgcgggtggaaaccaacagcgaaccgcggatggatcgcgtgctggccacgctgacccgcctcgacccggcgatgacggtgctcgacgacgaccgccgtccgctgcgcaacacccgcgaggccgccgcgctggccgagcagatgccagttaccggcgcgggcgcgcccgaccccgacagccccgagctggccgccgcgctcgaggaattcatccgcgactacgagaccagctggctcgatcaacccatccccgcgctggacgggcacacgccgcggcaggccgccgacgaccccacccgccgcgccgacctgatcaagctcctggacacgtttcccgccggcgcgggcgcccgtggcgggatggacgccgaccggctgcgcaccgctttgggcttgtag

SEQ ID NO: 101 - DNA, 408 bp, Mycobacterium Tuberculosis
gtgagcacgacgccggccgccggagtgctcgacacgtcggtgttcatcgcgaccgaaagcggccggcaactcgacgaggcgctgatccccgaccgggtcgccaccaccgtcgtcaccctcgccgaactgcgcgtcggcgtgctggccgcggcgacgaccgacatccgggctcaacgcctggcgaccctggaatccgttgccgatatggaaacgttgcccgtcgacgacgatgccgcccgaatgtgggcccgattgcggatccatcttgccgagtccggtcgccgggtgcggatcaacgacctgtggatcgcggccgtcgcggcatcgcgagcgctgccggtcatcacccaggacgacgacttcgccgccctcgacggtgcggccagtgtggagatcattcgggtctga

SEQ ID NO: 102 - DNA, 1152 bp, Mycobacterium Tuberculosis
gtgcggatcggagtcggggtttccaccgcgccggacgtgcgccgggccgcggcggaggctgccgcgcacgcgcgcgaggagctcgcgggtgggacgccggcgctggccgtgctcctcggatcgcggtcacacaccgaccaggccgtggacctgctggctgcggtgcaggcgtcggtcgagccggccgcgctgatcggttgcgtggcccaaggcatcgtcgccggtcgccacgagctggagaacgagcccgcggtggcggtgtggctggcgtccggcccacccgcggagacattccacctggacttcgttcgcaccggctcgggcgctctgatcaccggttaccgcttcgaccggaccgcgcacgacttgcacctgctgctgccggacccgtactcgttcccgtcgaatctgctcatcgagcacctcaacaccgacctgccgggaacgaccgtcgtcggcggggtggtgagcggtgggcgtcggcggggcgacacccggctgtttcgtgaccgcgacgtgctcacctccgggctggtcggcgtgcgcctgcccggcgcgcacagcgtttccgtggtgtcgcagggctgccggccgatcggggaaccgtacattgtcaccggcgcggacggtgccgtgatcaccgagctgggcggccgaccgccgctgcaccgcctgcgggagatcgtcttggggatggcgcccgacgagcaggaactggtcagccgcggcctgcagatcggaatcgtcgtcgacgagcacctggcggtgccgggtcagggcgactttttgatccgcgggctgctcggcgccgacccaacgacgggggcgatcgggatcggcgaggttgtcgaggtcggcgcgaccgtgcaattccaggtccgggacgcggcggcggccgacaaggacctgcgcctggccgtcgagcgggcggcggcggagctgcccgggcccccggtcggtgggctgctgttcacctgcaacgggcgcggacgacgaatgttcggggtcaccgaccacgacgcgtcgacgatcgaggacctgctgggcgggattccgctggccggtttcttcgccgccggggagatcggcccggtcgcgggccacaacgcgttgcacgggtttaccgcgtcgatggcgctgttcgtcgactga

SEQ ID NO: 103 - DNA, 696 bp, Mycobacterium Tuberculosis
atgagcgacccggtcagctatacccgcaaggattccatcgccgtcatcagtatggacgacggcaaggtcaacgcactgggcccggcgatgcaacaagccctcaatgcagcgatcgacaacgcggaccgtgatgatgttggggcgctggtgatcaccggtaatggccgggtattcagcggaggcttcgacctgaagatcctcacctccggtgaagtgcagcccgcgatcgacatgctcaggggcggcttcgagctggcgtatcgcctcttgtcctaccccaaaccggtggtgatggcgtgcaccggtcacgccatcgccatgggcgcgtttctgttgtcctgcggcgatcatcgggtggcggcccacgcatacaacatccaggccaatgaggtcgcgatcggcatgaccattccgtacgcggcgttagagatcatgaagctgcgactgacccggtcggcataccagcaggcaaccgggctggccaagacgttcttcggggaaaccgcgctggccgccgggtttatcgacgagatcgccctgccggaggtggtggtcagccgcgccgaggaagccgcacgagagttcgccggtctcaaccaacacgcccatgccgcgaccaagttgcgctcccgcgccgacgcgctcactgcgattcgggccgggatcgacgggatagcagccgagttcgggctgtaa

SEQ ID NO: 104 - DNA, 501 bp, Mycobacterium Tuberculosis
atggcgctcaagaccgatatccgcgggatgatttggcggtacccggactacttcatcgtgggccgtgagcaatgccgcgagtttgcccgagctgtcaagtgcgaccacccggcctttttcagcgaggaagcggccgccgacctcggttacgacgcgctggttgctccgctgaccttcgtgacgatcctcgccaaatatgtgcaactggacttcttccgccacgtcgacgtgggcatggagacgatgcagatcgttcaggtcgaccagcggttcgtgttccacaaacccgtgctcgccggggacaagttgtgggctcggatggacatccattcggtggacgagcggttcggcgcagacatcgtcgttaccagaaacctctgcaccaacgacgacggtgagctggtcatggaggcctacaccacgctgatgggccagcagggtgatggttccgccagactcaaatgggacaaggaatccgggcaggtcatcaggaccgcgtaa

SEQ ID NO: 105 - DNA, 864 bp, Mycobacterium Tuberculosis
atggtcaacgacctaacgccgcacttcgaggacgtgcaggcacactacgacctgtccgacgacttcttccggctgttcctggatccgacccagacctacagctgcgcgcatttcgaacgcgaggacatgacgctggaagaggcccagatcgccaagatcgacctggcgctgggcaagctaggtctgcagcccggcatgacgctgctcgatatcggttgcggctggggcgccaccatgcggcgcgcgatcgcgcagtatgacgtcaacgtcgtcggcctgacattgtcgaagaaccaggccgcccatgtgcagaagtcgttcgacgagatggacaccccgcgcgacaggcgagtgttgctggcgggatgggagcagttcaacgagcccgtcgaccgcatcgtgtcgatcggcgcgttcgagcacttcggccacgatcgtcacgccgacttcttcgcccgggcccacaaaatcctgccgcccgatggcgtgttgctgctgcacacgatcaccggcctgaccaggcagcagatggtcgaccacggcttgccgctcacgttgtggctggcccgctttctcaagttcatcgcgaccgaaatcttcccggggggccaacctccgacgattgaaatggttgaggaacagtcggcgaagacgggtttcacgctgactcgccgccagtcgctgcagccgcattacgccaggaccctcgacctgtgggccgaggcgctgcaggaacacaaaagcgaggccatcgcgatccagtccgaagaggtctacgagcggtacatgaaatacctgaccggctgcgccaagctgttccgggtcggctacatcgacgtcaaccagttcacgctggcgaagtag

SEQ ID NO: 106 - DNA, 3951 bp, Mycobacterium Tuberculosis
gtgctcgacgtcaacttcttcgatgaactccgcatcggtcttgctaccgcggaggacatcaggcaatggtcctatggcgaggtcaaaaagccggagacgatcaactaccgcacgcttaagccggagaaggacggcctgttctgcgagaagatcttcgggccgactcgcgactgggaatgctactgcggcaagtacaagcgggtgcgcttcaagggcatcatctgcgagcgctgcggcgtcgaggtgacccgcgccaaggtgcgtcgtgagcggatgggccacatcgagcttgccgcgcccgtcacccacatctggtacttcaagggtgtgccctcgcggctggggtatctgctggacctggccccgaaggacctggagaagatcatctacttcgctgcctacgtgatcacctcggtcgacgaggagatgcgccacaatgagctctccacgctcgaggccgaaatggcggtggagcgcaaggccgtcgaagaccagcgcgacggcgaactagaggcccgggcgcaaaagctggaggccgacctggccgagctggaggccgagggcgccaaggccgatgcgcggcgcaaggttcgcgacggcggcgagcgcgagatgcgccagatccgtgaccgcgcgcagcgtgagctggaccggttggaggacatctggagcactttcaccaagctggcgcccaagcagctgatcgtcgacgaaaacctctaccgcgaactcgtcgaccgctacggcgagtacttcaccggtgccatgggcgcggagtcgatccagaagctgatcgagaacttcgacatcgacgccgaagccgagtcgctgcgggatgtcatccgaaacggcaaggggcagaagaagcttcgcgccctcaagcggctgaaggtggttgcggcgttccaacagtcgggcaactcgccgatgggcatggtgctcgacgccgtcccggtgatcccgccggagctgcgcccgatggtgcagctcgacggcggccggttcgccacgtccgacttgaacgacctgtaccgcagggtgatcaaccgcaacaaccggctgaaaaggctgatcgatctgggtgcgccggaaatcatcgtcaacaacgagaagcggatgctgcaggaatccgtggacgcgctgttcgacaatggccgccgcggccggcccgtcaccgggccgggcaaccgtccgctcaagtcgctttccgatctgctcaagggcaagcagggccggttccggcagaacctgctcggcaagcgtgtcgactactcgggccggtcggtcatcgtggtcggcccgcagctcaagctgcaccagtgcggtctgcccaagctgatggcgctggagctgttcaagccgttcgtgatgaagcggctggtggacctcaaccatgcgcagaacatcaagagcgccaagcgcatggtggagcgccagcgcccccaagtgtgggatgtgctcgaagaggtcatcgccgagcacccggtgttgctgaaccgcgcacccaccctgcaccggttgggtatccaggccttcgagccaatgctggtggaaggcaaggccattcagctgcacccgttggtgtgtgaggcgttcaatgccgacttcgacggtgaccagatggccgtgcacctgcctttgagcgccgaagcgcaggccgaggctcgcattttgatgttgtcctccaacaacatcctgtcgccggcatctgggcgtccgttggccatgccgcggctggacatggtgaccgggctgtactacctgaccaccgaggtccccggggacaccggcgaataccagccggccagcggggatcacccggagactggtgtctactcttcgccggccgaagcgatcatggcggccgaccgcggtgtcttgagcgtgcgggccaagatcaaggtgcggctgacccagctgcggccgccggtcgagatcgaggccgagctattcggccacagcggctggcagccgggcgatgcgtggatggccgagaccacgctgggccgggtgatgttcaacgagctgctgccgctgggttatccgttcgtcaacaagcagatgcacaagaaggtgcaggccgccatcatcaacgacctggccgagcgttacccgatgatcgtggtcgcccagaccgtcgacaagctcaaggacgccggcttctactgggccacccgcagcggcgtgacggtgtcgatggccgacgtgctggtgccgccgcgcaagaaggagatcctcgaccactacgaggagcgcgcggacaaggtcgaaaagcagttccagcgtggcgctttgaaccacgacgagcgcaacgaggcgctggtggagatttggaaggaagccaccgacgaggtcggtcaggcgttgcgggagcactaccccgacgacaacccgatcatcaccatcgtcgactccggcgccaccggcaacttcacccagactcgaacgctggccggtatgaagggcctggtgaccaacccgaagggtgagttcatcccgcgtccggtcaagtcctccttccgtgagggcctgaccgtgctggagtacttcatcaacacccacggcgctcgaaagggcttggcggacaccgcgttgcgcaccgccgactccggctacctgacccgacgtctggtggacgtgtcccaggacgtgatcgtgcgcgagcacgactgccagaccgagcgcggcatcgtcgtcgagctggccgagcgtgcacccgacggcacgctgatccgcgacccgtacatcgaaacctcggcctacgcgcggaccctgggcaccgacgcggtcgacgaggccggcaacgtcatcgtcgagcgtggtcaagacctgggcgatccggagattgacgctctgttggctgctggtattacccaggtcaaggtgcgttcggtgctgacgtgtgccaccagcaccggcgtgtgcgcgacctgctacgggcgttccatggccaccggcaagctggtcgacatcggtgaagccgtcggcatcgtggccgcccagtccatcggcgaacccggcacccagctgaccatgcgcaccttccaccagggtggcgtcggtgaggacatcaccggtggtctgccccgggtgcaggagctgttcgaggcccgggtaccgcgtggcaaggcgccgatcgccgacgtcaccggccgggttcggctcgaggacggcgagcggttctacaagatcaccatcgttcctgacgacggcggtgaggaagtggtctacgacaagatctccaagcggcagcggctgcgggtgttcaagcacgaagacggttccgaacgggtgctctccgatggcgaccacgtcgaggtgggccagcagctgatggaaggctcggccgacccgcatgaggtgctgcgggtgcagggcccccgcgaggtgcagatacacctggttcgcgaggtccaggaggtctaccgcgcccaaggtgtgtcgatccacgacaagcacatcgaggtgatcgttcgccagatgctgcgccgggtgaccatcatcgactcgggctcgacggagtttttgcctggctcgctgatcgaccgcgcggagttcgaggcagagaaccgccgagtggtggccgagggcggtgagcccgcggccggccgtccggtgctgatgggcatcacgaaggcgtcgctggccaccgactcgtggctgtcggcggcgtcgttccaggagaccactcgcgtgctgaccgatgcggcgatcaactgccgcagcgataagctcaacggtctgaaggaaaacgtgatcatcggcaagctgatcccggccggtaccggtatcaaccgctaccgcaacatcgcggtgcagcccaccgaggaggcccgcgctgcggcgtacaccatcccgtcgtatgaggatcagtactacagcccggacttcggtgcggccaccggtgctgccgtcccgctggacgactacggctacagcgactaccgctag

SEQ ID NO: 107 - DNA, 612 bp, Mycobacterium Tuberculosis
ttgggtcgcaggggtaaccgaagggtgcacgttgaccgcgtgaggctaaccggcaccgagcgtgaactgagggcggagaatcagagccccccgattttccgcccgcagaacacgttgggcgacggcgccaacgggctgccactggccgtgtgcaccacgacggctcacacgtgccacacttcccatactcacccatcgcggtggaccccaaacccagtgccggccaccaagggcgtccccgctggattggtgcaagcaaccttcatcatcgaaaaccttgaccccggcaacaacgacacgccgaccccccctacacccaaactgcgattagcccgaaaacctgggcaccataggcgatctgaatacgatgcggattcggtgctgcggagaaaggatacatcgcgccgatgcgtccaggcggatgacgtccgatgcgtgcagctggtccaggatccgcggcgcggacgtgtcgaactcggtggttaccgcgccgagcttactgttggccgacgggcggcggtgaattgccaacgcccgcaatatggtgcggatggatggcccgttcggttgggttgcggggtaggcggcgccgcgcgaggcgatcagcgctga

SEQ ID NO: 108 - DNA, 234 bp, Mycobacterium Tuberculosis
atggcagtgggtgtctcgccgggcgaactgcgtgagctcaccgacgaggagctggccgagcggttgcgcgagtccaaggaagagttgttcaacttgcgtttccagatggcgaccggccagctcaacaataaccgccggctccgtacggtgcgtcaggaaatcgcgcgcatctacaccgtgctgcgcgaacgagaactgggtctggcgactgggcccgatggtaaggaatcgtga

SEQ ID NO: 109 - DNA, 411 bp, Mycobacterium Tuberculosis
gtgatggcagaggctaagaccggcgcgaaggcggcgcctagggtggctaaggccgccaaggcggcccccaagaaggccgcacccaacgacgctgaggccataggtgcggccaacgcggcaaacgttaaggggcccaagcacactccgcgtactccgaagccacgcggccgccgcaagacacgaatcggctatgtggtgagcgacaaaatgcagaagaccattgtggtggagctggaagaccgcatgcggcacccgctatacggcaagatcatccggaccactaagaaggtcaaggcacacgacgaagacagcgttgccggcattggcgaccgtgtctcgctgatggagacgcgtccgctgtcggcgaccaagcgctggcggctcgtcgagatcctcgagaaggctaagtaa

SEQ ID NO: 110 - DNA, 369 bp, Mycobacterium Tuberculosis
gtgattcagcaggaatcgcggctgaaggtcgccgacaacaccggcgccaaggagatcttgtgcatccgggtgctgggcggttcgtcgcgacgctacgccggcatcggtgacgtcatcgtcgccaccgtgaaggacgccattccgggcggcaacgttaagcggggggatgtcgtcaaggccgtcgtggtgcgcacagtcaaggaacgccgacgtcccgacggcagctacatcaagttcgacgagaacgccgcggtgatcatcaagcccgacaacgacccgcgcggcacccgcatttttggaccggtcggtcgcgagctgcgggagaagcggtttatgaagatcatttcgctggccccggaggtgttgtag

SEQ ID NO: 111 - DNA, 540 bp, Mycobacterium Tuberculosis
atgtcgcgtattggtaagcagccgattccggtgcccgccggggtcgacgtcacgatcgagggacagagcatctcggttaaggggcccaagggcaccctaggactgacggtcgccgagccaatcaaagtggcacgcaatgacgacggcgctatcgtggtcacccgtcccgacgatgagcggcgtaatcgctccttacacgggctgtcccgtaccctggtgtccaacctggtcactggcgtgacgcaggggtacaccaccaagatggagatcttcggggttggctatcgggtgcagctcaagggctccaatctggagtttgcgctggggtacagccacccggtggtgatcgaggctcccgaaggaatcacgttcgccgtccaggcaccgacgaagttcaccgtttccgggatcgacaaacaaaaagtcggccagatcgccgccaatatccgccgtcttcgccgtcccgatccgtacaagggcaagggcgtgcgctacgagggcgagcagatccgccgcaaggtcggaaagacaggtaagtag

SEQ ID NO: 112 - DNA, 369 bp, Mycobacterium Tuberculosis
atggcgcaatcagtttccgcgactcgacgaatctcccgcctgcgccggcacacgcggctgcggaagaagctctcgggcaccgcggagcgcccgcggctggtggtgcatcggtccgcgcggcacatccacgtgcaactggtgaacgacctcaacggcaccaccgtggccgccgcttcgtcgatcgaggccgatgtgcgcggcgtgccgggtgacaaaaaggcccgcagtgtgcgggtcggccagttgatcgccgagcgggccaaagccgccggcatcgacaccgtggtattcgaccgcggcgggtatacctacggcggacgaatcgccgcgctggccgacgccgcacgcgagaacggattgagtttctga

SEQ ID NO: 113 - DNA, 1326 bp, Mycobacterium Tuberculosis
gtgctttcggctttcatctcgtcgctgcgaacagtcgacttgagacgaaagatcctcttcacgctgggcatcgtcattctctaccgtgtcggtgccgcgctgccgtcccccggtgtcaattttccgaacgtgcagcagtgcatcaaagaagccagcgcgggcgaagccggacagatctattccctgatcaacctgttctccggcggtgcgttattaaagctcacggtgttcgcggtgggggtgatgccctacatcaccgccagcatcatcgtgcagctgctcaccgtggtcatcccgaggttcgaggaactccggaaggaaggccaggcgggtcagtcgaagatgacccagtacacccgttacctagcgatcgcgttggctatccttcaagccaccagcatcgtggcgttggctgccaacggcgggttgctacaaggttgctcgctggacatcatcgccgaccagagcattttcacactggtcgtcatcgtgctcgtgatgacgggcggcgccgcgttggtgatgtggatgggcgagttgatcaccgaacgcggcatcggcaacggcatgtcgctgctgatcttcgttggcatcgctgcccgcatcccggccgaaggtcaaagcatcctggaaagccgcggtggagtcgtcttcaccgcggtctgcgcggccgcgttgatcatcatcgtcggtgtggtgttcgtcgaacagggtcagcgccggattccagtgcaatacgccaagcgcatggtgggccggcggatgtatggcgggacttcgacttatctgccgctcaaggtcaaccaggccggcgttatcccggttatcttcgcgtcgtcgctgatctacattccgcacctgatcacccagctgattcgcagcggcagcggtgtcgtgggaaacagctggtgggacaaattcgtcggcacgtacctgtccgacccgagcaacctggtctacatcggcatctacttcggcctcatcatcttcttcacctacttctacgtgtcgatcaccttcaaccccgacgaacgtgccgacgagatgaagaagttcggcggcttcattccgggaattcggccgggccgtccgaccgcagactatctgcgctatgtgctgagccggattaccttgccgggctcgatttacctcggcgtgatcgccgtgctgcccaacctgttcctccagatcggcgccggtggaaccgtgcagaacctgccctttgggggtaccgcggtgctgatcatgatcggtgtcggtttggatacggtcaagcagatcgagagtcagctcatgcagcgcaactacgaagggttcctcaagtga

SEQ ID NO: 114 - DNA, 498 bp, Mycobacterium Tuberculosis
gtggcctcagataatcgcgaccccatcgccgcagcacgggccaactgggagcgttccgggtggggtgatgtgtcgctaggcatggtggcggtgacgtcggtgatgcgtgcgcatcagattctgctggcccgcgtcgagacggcgctgcgcccctatgacctgagtttctcccgcttcgagctgctgcggctgctggcgttcagccgtatcggagcgctaccgatcaccaaagcgtcggaccgattgcaggttcacgtgaccagcgtcacccacgcgatccgccggctggaggccgatggattggtgcggcgggttccgcaccccaccgacgggcggaccacactggtgcagatcaccgagctgggtcgctccacggtcgaggacgccaccgtcaccctcaacgagcaggtgttcgccaacgttgggatgggcgccgaggaatcgcaggcgctggtgtcggccgtcgaaacgttgcggcgcaacgccggcgacttttga

SEQ ID NO: 115 - DNA, 207 bp, Mycobacterium Tuberculosis
atgggctatcgagtcgaagccgaccgggatctgtgccaaggacacgcgatgtgcgagctggaggcacccgagtatttccgggtgcccaagcgcggccaggtcgaaatcctcgaccccgagccgcccgaggaagcccgcggcgtgatcaagcatgccgtgtgggcctgtcccacccaggcactgtccatccgagaaacgggagagtaa

SEQ ID NO: 116 - DNA, 1269 bp, Mycobacterium Tuberculosis
gtgcgcgtcctggtaatcggttcgggtgcccgcgaacatgcgctattgctggcgctcggcaaagacccgcaggtttcggggctaatcgttgctcccggcaatgcaggcaccgctcggatcgccgagcagcacgacgtcgacatcacctccgccgaggcggtggtcgccctggctcgcgaagtcggcgctgacatggtggtgattggccccgaggtaccgttagtgctcggggtggccgacgccgtgcgcgcggccggcatcgtgtgtttcgggcccggtaaggacgcggctcgcatcgaaggctccaaagcattcgccaaggacgtcatggcggcggccggtgtgcgcaccgcgaacagcgaaatcgtagacagcccagcgcacttggacgcggccctggaccggttcgggccgcctgccggtgacccggcctgggtggtcaaagacgaccggctagccgccggcaagggtgtggtggtgacagcggaccgcgatgtcgcgcgcgcacacggagctgccctgctcgaggccgggcacccggtgttgctggagtcctacctggacggcccggaggtatcgctgttctgtgtcgtcgaccgcaccgtcgtggtgccgctgctgccggcacaggacttcaagcgagtcggtgaggacgacaccggacttaacaccggcggtatgggcgcctacgcgccgctgccgtggttgcccgacaacatctatcgggaggtggtcagccggatcgtcgaacccgttgcggccgaactagtccggcgtggaagctcgttttgcggattgctgtatgttggtctcgcgattaccgcccgcgggccggcggtggtcgagttcaactgccgattcggcgatccggagacccaagccgtgctggccttgctggagtctccgctcggccaactgcttcatgccgccgctaccgggaagctggccgatttcggcgagttgcggtggcgtgacggtgtggccgtaacagtggtactggcggccgaaaactatcccgggcgcccccgggtcggcgacgtcgttgtcggctccgaagccgagggggtgctgcacgccggaaccacgcggcgcgacgatggcgcgatcgtttcgtccggtggccgggtgctgtcggtggtgggcaccggtgccgacttgtccgcagcacgcgcacacgcgtatgaaatcctcagttcaattcggttgccaggaggtcatttccgcagcgatatcggtttacgggcggccgaggggaagatcagcgtctag

SEQ ID NO: 117 - DNA, 621 bp, Mycobacterium Tuberculosis
atgagatcgcgcttcttgccgtatgccaccacgcccggccgactgctggcccaactgatcagcgatatcactgtcgcggtgtggacgacgctatggatgctcgtcggcctcgccgtgcacgacgccatctcgataatcggcgaggccggccgccaaatcgaaatcggctcgcacgggattgccggcaacctggcggccgcgggccaggacgcccagcgtatcccggtggtgggcgacgcgctcagcaaccccatcaccgccgcaagccaggccgcccttgacatcgccggcgccggccacaacctggacaccacggccggctggcttgcggtagtgctcgcgctggcggtcgccgcgacgccgattcttgccgtggccatgccctggctgttcctgcggctgcggttctgccggcgcaagtggaccgttaccaccctggcggcgaccccagccggtcgccagctgctggcgctgcgcgcattggcgaaccggccgccgggcaaactggccgccgtcagcaccgatccggtcggcgcctggcgacgagaggatcccgccaccatgcgtgcgctggccgcgctcgagttgcgggccgccggaatcccgctgcgcggggactag

SEQ ID NO: 118 - DNA, 1623 bp, Mycobacterium Tuberculosis
atgctcggcaacgccatggttgaagcgtgtcccgcggaaggcgatgccccggtgcccatcacccccgcggggcggccccgctctggccaacgcagctatcccgataggctcgatgtggggttgcttcggaccgccggagtgtgtgtcctggcctcggtgatggcacatgtggacgtcaccgtggtcagcgtcgcgcaacgcaccttcgttgccgatttcgggtccacccaggccgtcgtggcctggaccatgaccggctacatgctcgcgttggccactgtgatcccgacagccggttgggcggccgaccggttcggcaccaggcggcttttcatgggttcggtattggcgttcaccctcggctcactgctgtgcgcagtagcaccaaacatcttgctgctcatcatatttcgtgttgtccagggtttcggtgggggcatgctgacgccggtgtcctttgccatcttggcccgtgaggcgggcccgaagcggctggggcgcgtgatggcggtggtgggcattccgatgctgctcggcccggtcggtgggccgatcctgggtggttggctcatcggggcctacggctggcgttggattttcttggtcaacctgccggtcgggctgtccgcgctcgtcttggcggcgatcgtgttcccaagagatcgcccggcagcgtcggaaaacttcgactacatgggcctcttgttgctgtcgccgggcctggcgaccttcctgttcggggtgtcatctagccccgcccgtggaacgatggccgatcggcacgtgttgataccggcgatcaccggcctggcgttgatcgcggcattcgtcgcacattcgtggtaccgcacagaacatccgctcatagacatgcgcttgttccagaaccgagcggtcgcgcaggccaacatgacgatgacggtgctctccctcgggctgtttggctccttcttgctgctcccgagctacctccagcaagtgttgcaccaatcaccgatgcaatcgggggtgcatatcatcccacagggcctcggtgccatgctggcgatgccgatcgccggagcgatgatggaccgacggggaccggccaagatcgtgctggttgggatcatgctgatcgctgcggggttgggcaccttcgcctttggtgtcgcgcggcaagcggactacttacccattctgccgaccgggctggcaatcatgggcatgggcatgggctgctccatgatgccactgtccggggcggcagtgcagaccctggccccacatcagatcgctcgcggttcgacgctgatcagcgtcaaccagcaggtgggcggttcgatagggaccgcactgatgtcggtgctgctcacctaccagttcaatcacagcgaaatcatcgctactgcaaagaaagtcgcactgaccccagagagtggcgccgggcggggggcggcggttgacccttcctcgctaccgcgccaaaccaacttcgcggcccaactgctgcatgacctttcgcacgcctacgcggtggtattcgtgatagcgaccgcgctagtggtctcgacgctgatccccgcggcattcctgccgaaacagcaggctagtcatcgaagagcaccgttgctatccgcatga

SEQ ID NO: 119 - DNA, 729 bp, Mycobacterium Tuberculosis
atgacgctagccaacaatggaaccggcatggaccactttctgacgcccacggagtacctcgacgcgggccatccgctcgttcgtacgacggcagcaaccctcatccgggacgcggtgtcggataccgagcgggtcaggcggatctactactacgtgcgcgacgtgccatacgacgtcctcgcgtcctttcgctacctcgcgcagggacatcaccgcgccagcgacgtgatcggccacggggtcgccttctgcatgggcaaggcaagttccttcgtcgccctgtgccgagccgccggtgtcccggcccgtatcgcgttccagacgatcgacgcccccgataaggagtttctgtccccgcaggtacgtgccctatggggaggccgaactggccggcccttcccgtggcactcgctgggtgaggcatatcttggtcggcgatgggtcaagctggacgccaccatcgacgcacccaccgccgcccgcctcggcaagccctaccggcaagaattcgacggagctaccccgatcccgacggtggaaggaaccatcctgcgggaaaacggcagctacgccgactatcccagcgcggtcgcgcaatggtacgaacgaatcgctcagtcggtcctgaaggcgttgcagtccaccgaagtacacgccttggtagccgctgacgaggaactgtggaccggccccccggttgaattggccgacgcaacccaccgactgtga

SEQ ID NO: 120 - DNA, 810 bp, Mycobacterium Tuberculosis
atgacatctgtcaagctggacctggacgctgccgatctgcggatatcgcgtggcagcgtgccggcgagtacccagcttgccgaggcgctaaaggcccagatcatccagcagcggctgccgcgcggcgggcgcttgcccagcgaacgagaattgatcgaccgttccggtttgagccgcgtgaccgtgcgcgcggcggtcggcatgctgcaacgtcagggatggctagtgcgccggcaaggcttgggtaccttcgtcgccgatccggtggaacaggagctcagttgcggcgtgcgcaccatcacagaggtgttgttgagctgtggtgttaccccgcaggtcgacgtgctgtcacaccagaccggaccggcgccgcaacggatttccgagacgctgggtttggttgaggtcctctgtattcgccggcgcatccgcactggcgatcaacccttggccctggtcacggcctatcttccgcccggcgtgggcccagccgtcgagccgttgctatcgggcagcgcggacaccgaaaccacatatgcgatgtgggagcggcgactgggtgtacgcattgcacaggctacccacgaaatccatgccgccggggcctcccccgacgtagccgacgcgttgggtctggcggtgggttcgccggtactggtcgtcgaccgcaccagctacaccaatgacggcaagccccttgaagtggtcgtgttccaccatcgccccgagcggtaccagttctccgtcacgttaccccgaacgttgcccggatcaggtgccggaattatcgagaaacgagatttcgcatga

SEQ ID NO: 121 - DNA, 798 bp, Mycobacterium Tuberculosis
atgaacaatctctaccgcgatttggcaccggtcaccgaagccgcttgggcggaaatcgaattggaggcggcgcggacgttcaagcgacacatcgccgggcgccgggtggtcgatgtcagtgatcccggggggcccgtcaccgcggcggtcagcaccggccggctgatcgatgttaaggcaccaaccaacggcgtgatcgcccacctgcgggccagcaaaccccttgtccggctacgggttccgtttaccctgtcgcgcaacgagatcgacgacgtggaacgtggctctaaggactccgattgggaaccggtaaaggaggcggccaagaagctggccttcgtcgaggaccgcacaatattcgaaggctacagcgccgcatcaatcgaagggatccgcagcgcgagttcgaacccggcgctgacgttgcccgaggatccccgtgaaatccctgatgtcatctcccaggcattgtccgaactgcggttggccggtgtggacggaccgtattcggtgttgctctctgctgacgtctacaccaaggttagcgagacttccgatcacggctatcccatccgtgagcatctgaaccggctggtggacggggacatcatttgggccccggccatcgacggcgcgttcgtgctgaccactcgaggcggcgacttcgacctacagctgggcaccgacgttgcaatcgggtacgccagccacgacacggacaccgtgcgcctctacctgcaggagacgctgacgttcctttgctacaccgccgaggcgtcggtcgcgctcagccactaa

SEQ ID NO: 122 - DNA, 348 bp, Mycobacterium Tuberculosis
atggcactcaaggtagagatggtcactttcgactgcagcgaccctgcgaagcttgccggctggtgggccgagcagttcgatggcacgacgcgtgaactgctgcccggcgaattcgtcgtggtcgcccggaccgatggaccgcggttgggattccagaaggtgcccgatcccgcccctgggaaaaaccgcgtgcacctcgacttcacgaccaaggacctggatgccgaggtgttgcgcctggtcgccgccggagccagtgaggtcgggcggcatcaggtcggcgagagctttcgctgggtggtgctggctgaccccgaaggcaacgctttttgcgtggcgggtcaataa

SEQ ID NO: 123 - DNA, 1584 bp, Mycobacterium Tuberculosis
gtggccgtagactcggattacgtcaccgaccgcgccgcagggagccgccaaaccgtgaccggccagcaacccgagcaagacctgaactcgccccgggaagagtgcggtgtcttcggggtctgggccccgggtgaagacgtcgccaaactcacctactacggcctgtacgcgttgcagcatcgcggccaggaagccgccgggatcgccgtcgccgacggctcccaggtgctggtcttcaaagacctcggcctggtcagccaggtgttcgacgagcagacgttggcggccatgcagggccatgtcgccatcgggcactgtcgttactccaccaccggggacacgacgtgggagaacgcccagcccgtgttccgcaacaccgccgctggcaccggtgttgcgttgggccacaacggaaatctggtcaatgccgctgcccttgccgcccgcgcccgcgacgcggggttgatcgccacccgctgcccagccccggcgacgacggactccgacattctgggggcgctgctggcccacggtgctgccgattccaccctcgaacaggcggcgctggacctgctgcccacagtgcggggagcgttctgtctgacgttcatggacgaaaacacgctttatgcgtgccgcgacccgtacggggtgcgcccgctatcgctcgggcgtttggaccgtggctgggtggtggcctccgaaacggccgcactcgacatcgtcggcgcctcgttcgtccgtgatatcgaaccgggcgaattgctggctatcgacgccgacggggtgcggtccacccgctttgccaaccccacgcccaagggctgcgtattcgaatacgtctacctggcgcggccggacagtacgatcgccggccggtcggtacacgccgcgcgggtggagatcggtcgccgactggctcgggaatgcccggtcgaggccgacttggtgattggtgtgccggaatccggcacacccgccgcggtcggctacgcgcaggagtccggcgttccatatgggcagggtctgatgaagaacgcctatgtcgggcgcaccttcatccagccgtcacagaccatccgtcagctcggcatccggctgaagctcaacccgctcaaagaggtgatccgcggcaagcggctcatcgtcgtcgacgactcgatcgtgcggggcaacacccagcgtgcgctggtacgcatgctgcgcgaggccggtgcggtcgaattgcatgtgcgcatcgcctcgccaccggtgaagtggccgtgcttctacggtatcgacttcccctcgccggccgagttgatcgccaacgccgtggaaaacgaggacgagatgctggaggcggtacggcatgccatcggggccgacacgctgggatacatctcgctgcggggcatggtcgcggcgtccgagcagcccacgtcgcggctgtgcaccgcttgcttcgacggcaagtatccaatagagctgccccgcgagaccgcgctaggcaaaaatgtcatcgagcacatgctcgccaatgcggcccgcggagccgcgctgggcgaactcgccgccgacgacgaagtccccgttgggcgctga

SEQ ID NO: 124 - DNA, 1056 bp, Mycobacterium Tuberculosis
gtgacccaagatacgtctgctacctgtccgctgaccagcaccgtgcaggattcctcgccggttgcgggccagcttggcaggcctatagggttccgcggactggccggcggttgccccgtgtcaccgctgggttacgaatcgccgccgctgccgctggggccggattcgctgacgtggcgatacttcggtgactggcgcgggatgctgcagggaccgtgggcgggatccatgcagaatatgcatccgcagctgggcgcggcggtcgaagatcattcgacgttcttccgggaacgctggccacggctgctgcggtcgttgtacccgatcggcggagttgtcttcgacggcgatcgagccccagtcaccggtgtgcaggtgcgtgactaccacatcaccatcaagggtgtcgacggtgcgggccgtcgctaccacgcgttgaatcccgacgtcttctactgggcgcacgccaccttctttgtcggcacgttgcatgtggccgagcggttctgcggtggcctgaccgaggcgcagcggcgccagctatttgacgagcacgtccagtggtaccgcatgtacggcatgagcatgcggccggtgccggcgacctgggaggagtttcaggactactgggaccacatgtgccgcaacgtgctggagaacaacttcgcggcgcgtgccgtgctcgacctgaccgaactacccaaaccgccattcgcccaacgagttccggattggctgtgggccgcgccgcgcaagttgctggcccggttcttcgtctggctgaccgtcggactctacgatccgcccgtgcgcgagctgatgggctaccggtggttgcgccgcgacgaatggttgcaccgccgctttggcgacatcgtccggctcgtctttgccttggtgccattccggtttcgcaagcacccgcgggctcgcgccggctgggaccgtgccaccggccgcatccccgccgatgcgccgctagtacagacgcccgcgcgcaacctgccgccgcccgacgagcgtgacaacccgacgcactactgccctaaggtctga

SEQ ID NO: 125 - DNA, 816 bp, Mycobacterium Tuberculosis
atgctccccgagacaaatcaggatgaggtccagcccaacgcacccgttgccctggtgacggtggaaatccgtcacccgacaacggattcgctcaccgaatcagcgaaccgggagctcaaacacctgcttatcaatgatctaccgatcgaacgccaggcgcaggacgtcagctgggggatgacggcgcccggtggagcccccaccccggtcgcggatcgtttcgttcgttatgtcaatcgcgataacaccaccgccgcttcactgaagaaccaggcgatagtcgtggagaccaccgcctaccgcagctttgaggcctttaccgacgttgtgatgcgggtcgtggatgctcgcgcgcaggtctcgtcaatcgttgggttggagcgtatcggtcttcgctttgttctggagatccgcgtccccgcgggtgtcgacggccggatcacgtggagcaactggatcgacgagcagctgctcgggccgcagcgtttcactcccggcggcctggtcctgaccgagtggcagggtgccgcagtctaccgtgagctacaaccaggcaaatcgctcatcgtgcgctacggcccgggtatgggccaagcgcttgatcccaattaccatctgcgccgaataacacccgcccaaaccggaccattcttcctgctggacatcgatagcttttggactcccagtggcggctccattcccgagtacaacagggacgccttagtgtcgacattccaggacctgtacggtccggcccaggtcgtgtttcaggagatgatcaccagtcgcctgaaagatgagctgcttcgccagtaa

SEQ ID NO: 126 - DNA, 2649 bp, Mycobacterium Tuberculosis
atgtctttcgtgattgcagcgccggacttggtggcgatggccacggaggatcttgcaggcatcggcgcgtccctgaccgctgccaatgcggcggccgccgtcccgacaagcgggctgttggccgctgctggcgatgaggtgtcggcggccatcgcggcgttgttttccagccacggtcagcagtatcaggcgatgagcgcgcaggcggcggcgtttcatgcccggtttgtgcaggcactggccggggctatgggcgcctatgcggccgccgaagcggccaacgcgtcgccgttgcagaccctcgagcagggcttgctaggcgccatcaatgcacccgccgccgcgttgtcgggccgaccttttatcggcaacggcaccaacggcgccccggggaccggggaggccggtgggcctggaggctggttgttgggcaacggcggcaacggcggttcgggtgctccggggcagaccgggggtgccgggggtgccgccgggctgctgggccatggcgggaccggtggggccggaggcaccggcgcctcgggtggcaaaggcggcaccggcgggtggctgtggggtagcggcggagctggcggggccggcgggtccggcggcgggtccggtggggcgggtggcaacgcgctgatgttcggcattggcggcaacggcggagctggcggggccgccagcggagtcgggaacggcggggtcggcggcgccggtggagccggcggcgcgctggtagccatcggtggcgccggtggcgccggcggggccgctaccactggaaccggcggtgccggcggcgccggcagcaacgcattggggctgttccttggcctgggcgggtccggcggtcagggcggcgactcggccatgggaagcggcggtgccggcggtgccggtggctctggtggcgccgccagccccttcgggatcgacatcggcatcggcggtgccggcgggcacggcggcgcaggtactaacggcggtgccggcggcgccggcggtgccggcggttcctcgggcaccgttttcgcgctcgacttgagctggggcggtgctggcggcaatggtggcgcagctaccactgggaccggcggggccggcggcactggcggcttcgctgttgcccccgacttcatcgggttcggcgcggcctacggcggggccggcgggcttggtggggctgcgaccggtgccggcggcaccggcgggaccggtggcgttggtgccggcggcttcgcggctctgggcgtgggcgtcggcggcgccggcggggctggcggggccgccaccgagaccggcggcatcggcggcgccggcggattgggcgtcgggctgctgggcggcgccggcggcgccggcggtcccggcggcgccgcttcggctggtagcggcggccatggcgggaccggcggcgatgccctcggattgatcggcgccggcatcggcggcgtcgggggggttggcggagccgccaccgacaccggcggcaacggcggcgccggaggcagcgggaccgggctgctgggcggcgtgggcggcgccggtgggcacggcggcggggcttcggttggtaccggcggcagcggcggtgccggcggtgacggcttcggattcgtcggcgcaggtggcaacggcggcaacgccggcaccggagtcggggttaacggcgccaacggcggcaacggcggcagcgctaccggcgcactcgcggccgtcggcggggccggcgcggccggcggggacgccaccagcggaaccggcgggttcggcggtgctggcggcagcgcccgcggcctgatctttgccctgggcggcgctggagccgccggcggcgacgcttccacgggagtcggcggacccggcggtccgggtggcacgggcaccgccagcagccccttcgggatcgccatcgccatcggcggtgcgggcgcgcagggcggcgccggcactagcggcgccaccggcggagccggcggtgacggcgtcttcgagggcattgctgtcctcggcctaggctttggcggcgccgccggggctggtggtgccgccaccggggacggcgccaccggcggagccggcggcttcggcggcgccggcgctggcatcgcaaacttcctagggttctccgtgctgcacggcggcgccggcggagctggcggcaccgccaccgggaccggcggcaacgggggggccggtggcggtggcgggttgagctcacccgtgatcctgggcatcggcatcggcggcgccggcggcgacggtggtggcgccctgggggtgctgggcggcatgggcggcgacggcggcgacggcggcgaggccgtagcggttgggatcgccgtgggcggtgccggcggtgccggcggcgccgcccccaccggtaacggtggcgctggcggcaacggcggcgacgccctcggactagtcggcgtgggtgggaacggcggcaacgccggcaccggcttcggggctaacaccggcggcaacggcggcgacacgacgatagttgtcaacggcatgctcgccccgtctaccctcggctacggtggcaacggcggcaacggcgtcaacggcggagccggcggtaccggtggcaaggccggggtgtttggcgcgccgggacagaacggcttgccataa

SEQ ID NO: 127 - DNA, 654 bp, Mycobacterium Tuberculosis
atgctcgtcggggcacagtgccgcgatctactgcactggcgcttctgccgcggggtgccgccgcgggccaccaacgacaccgatatcgcagggaccctgaacaattgggaccacttcgaggcaattcgggccaccttccgcgccctgggcagcaccgggcaccgattcctgatcgccgaccgcgccgtcgatgccctcccgttcggcgaggtggagtcgcccaccggcacaacccgccatcccccaggcaaccagctcatgaacgtccacggatgcaccgacgcctacctgcgtgccgatgttctgcctctccctggcggcctgacagtccaccttccccaaccgccgaactatgcggtcctcaaactgcacgcatggctcgatcggtccgcggaccacgactacaaagacggcccagatctggccttggtggtgcactggtacgccggcgacctcgaccggctttacgccaaaccagaccagtgggcgctacgccgtcacgacttcgacctacgcaccgccgctgccgcgctgctcggccacgacatgcgcgccagtgtcagcgcaccggaggccgccgtgctggcgacgcgcgccacacaggccgaccacgacctgctggcccagcacttcgccgtgggtcgaccgggctag

SEQ ID NO: 128 - DNA, 651 bp, Mycobacterium Tuberculosis
atgagcaatccgcagccggagaaagtgcgcgtggtggtcggcgacgaccacccgttatttcgcgagggcgttgtgcgagcgctttcgttgagtggctcggtgaacgtggtcggcgaggccgacgacggcgccgcggccctggagttgatcaaggcccatttgcccgacgtcgcattgctggactaccgcatgcccggcatggacggcgcgcaggttgcggcggcggtgcgcagctacgagttgccaacccgggtgctgcttatttccgcgcacgacgagccggcgatcgtctaccaggcactccaacagggcgccgccggattcctgctcaaggattcgactcgcaccgagatcgtcaaggcggtgctcgattgcgcgaagggccgcgacgtggtggcgccctcgctggtcgggggcctcgccggggagattcgccagcgcgcggcacccgtggccccggtgctcagcgcgcgcgagcgcgaggtgctcaatcgcattgcgtgcggtcaaagcatccccgcgatcgcagccgagctatatgtggcgccgtcgacggtaaagacccacgtgcaacggttgtacgagaagctcggcgtcagcgaccgagctgccgcggtcgccgaggcgatgcggcagaggctgctcgactag

SEQ ID NO: 129 - DNA, 1515 bp, Mycobacterium Tuberculosis
atgcccgagctggccacgagcggtaacgccttcgacaagaggcggttcagccggcgcggcttcctcggcgccggcatcgccagcggctttgcgctagccgcttgcgcctcgaagcccacggcatccggcgccgccgggatgaccgctgcaatcgacgcggccgaggcggcccggccgcacagtgggcgaacggttaccgccacgctgaccccccagccggcgaggatcgacctgggtgggccgatcgtcagcacgctgacctacggcaacaccatccccggaccactgatccgggccaccgtcggggatgagattgtcgtctcggtgaccaaccgtctgggtgatccgacgtcggtgcattggcacggcatcgcgctgcgcaacgatatggatggcaccgagcccgcgactgcgaacatcggccccggcggtgactttacgtaccggttctccgtgccggatccgggcacctactgggcccatccgcacgtcggtcttcaaggcgaccacggcctatatctgcctgtcgtcgtcgacgatccgactgagccaggccactacgacgccgaatggatcatcatcctcgacgattggacggacggcatcgggaagtccccgcaacagctctacggcgagctgaccgacccgaacaaacccaccatgcaaaacacaacaggtatgcccgaaggcgaaggcgttgacagcaacctgctcggcggcgacggaggggacatcgcctacccgtactatctgatcaacgggcgaatccccgtggcggccacgtcttttaaggccaagcctggccagcgaatccggatccgcatcatcaacagcgccgccgacaccgcgttccgcatcgcgctggccgggcattcgatgacggtcacccacaccgacggttacccagtgattcccaccgaagtcgacgctctgctgatcggcatggccgaacgctacgacgtcatggtgaccgccgctggcggcgtctttcccctggtcgcactcgcggaaggcaagaacgcgctggcgcgtgcgctgctgtctaccggcgccggcagcccacccgacccgcagtttcggccggatgaactcaactggcgagtgggtaccgtggaaatgttcaccgccgcaacgactgccaacctgggccggcccgaacccacccacgacctcccggtcaccttgggcggcaccatggccaagtacgactggacaatcaacggggaaccctacagcacgaccaatccactgcacgtgcggctaggccaacggccaaccctgatgttcgataacaccaccatgatgtatcacccaatccacctacacggccatacctttcagatgatcaaggccgacggcagccccggcgcccgcaaggacaccgtgatagtgctgcccaagcagaagatgcgcgccgtcctggtcgccgacaatcctggcgtgtgggtgatgcactgccacaacaactatcaccaggtcgccggaatggcgacccgcctggactacattctgtga

SEQ ID NO: 130 - DNA, 393 bp, Mycobacterium Tuberculosis
gtggtgtggatgcgatcggcgattgtcgcggtcgcgctgggggtgacggtagccgccgtcgccgctgcatgctggctcccccagctccaccgtcatgtggctcacccaaaccacccgttgacgacgtccgtaggtagcgaattcgtcatcaacaccgaccacgggcacctggtggacaactcgatgccaccgtgcccggaacggctcgcgacggcggtgctgccgcgctccgccactccggtgttactaccagacgtcgtggcggctgcgcccggcatgacagccgcgcttaccgaccccgtcgcgccggccgcgcgcggtccgccggcggcgcagggatccgttcgcaccggtcaagacctgttgacccggttctgcctggctcgtcgctga

SEQ ID NO: 131 - DNA, 1224 bp, Mycobacterium Tuberculosis
atgagtggacgccaccgtaagcccaccacatccaacgtcagcgtcgccaagatcgcctttaccggcgcagtactcggtggcggcggcatcgccatggccgctcaggcgaccgcggccaccgacggggaatgggatcaggtggcccgctgcgagtcgggcggcaactggtcgatcaacaccggcaacggttacctcggtggcttgcagttcactcaaagcacctgggccgcacatggtggcggcgagttcgccccgtcggctcagctggccagccgggagcagcagattgccgtcggtgagcgggtgctggccacccagggtcgcggcgcctggccggtgtgcggccgcgggttatcgaacgcaacaccccgcgaagtgcttcccgcttcggcagcgatggacgctccgttggacgcggccgcggtcaacggcgaaccagcaccgctggccccgccgcccgccgacccggcgccacccgtggaacttgccgctaacgacctgcccgcaccgctgggtgaacccctcccggcagctcccgccgacccggcaccacccgccgacctggcaccacccgcgcccgccgacgtcgcgccacccgtggaacttgccgtaaacgacctgcccgcaccgctgggtgaacccctcccggcagctcccgccgacccggcaccacccgccgacctggcaccacccgcgcccgccgacctggcgccacccgcgcccgccgacctggcgccacccgcgcccgccgacctggcaccacccgtggaacttgccgtaaacgacctgcccgcgccgctgggtgaacccctcccggcagctcccgccgaactggcgccacccgccgatctggcacccgcgtccgccgacctggcgccacccgcgcccgccgacctggcgccacccgcgcccgccgaactggcgccacccgcgcccgccgacctggcaccacccgctgcggtgaacgagcaaaccgcgccgggcgatcagcccgccacagctccaggcggcccggttggccttgccaccgatttggaactccccgagcccgacccccaaccagctgacgcaccgccgcccggcgacgtcaccgaggcgcccgccgaaacgccccaagtctcgaacatcgcctatacgaagaagctgtggcaggcgattcgggcccaggacgtctgcggcaacgatgcgctggactcgctcgcacagccgtacgtcatcggctga

SEQ ID NO: 132 - DNA, 1953 bp, Mycobacterium Tuberculosis
atggcacagcaaactcaggtcaccgaggagcaagcgcgggcccttgccgaggaatctcgcgaaagtggttgggataaaccgtccttcgccaaagaactctttctgggccgctttcccttagggctcatacacccatttcccaagccgtcggacgccgaggaggcccgaaccgaggcgtttctggtcaaactgcgggaattcctcgacaccgtggacggcagcgtcatcgagcgtgctgcccagatccccgacgagtacgtgaaaggcctggccgagctgggctgtttcggcttgaagattccgtccgagtacggcgggttgaacatgtcgcaagtcgcctacaaccgcgtgctgatgatggtcacgacggttcattccagtcttggcgcgttgttgtcggcgcatcagtcgatcggggtacctgaaccgctcaagcttgccgggactgcggaacagaagcggcggttcctaccgcggtgtgcggccggcgcgatatcggcctttttactaaccgaacccgatgtgggctccgatccggcgcgcatggcatcgacggcgacgccgatcgatgacggccaggcttacgagcttgagggtgtgaagttgtggaccaccaacggtgtggtagcggacctgctagtggttatggcgcgggtaccgcgcagtgaagggcaccgagggggaatcagcgcctttgtcgtcgaggctgattcgcccgggatcaccgtggagcggcgcaacaagttcatgggactgcgtggcatcgaaaacggcgtgacccggcttcatcgcgtcagggtgcccaaagacaacttgatcggcagggaaggcgacggtctgaagatcgcgctgaccacactcaacgccggacggctgtccctaccggcgatcgcaaccggagttgcgaaacaggcgctgaagatagcgcgggaatggtccgtcgagcgagtgcaatggggcaagccggttggccaacatgaagcggtagccagcaagatctcgttcattgccgccaccaattacgcgctcgatgcggtggtcgagctgtccagtcagatggccgacgaaggccgcaacgacatccggatcgaggctgcgctggctaaattgtggtccagtgagatggcctgcctggttggcgatgagttgctacagatccgcggtggccgcggatacgagaccgccgaatccctcgccgcgcgcggtgagcgggcggtaccagtggagcagatggtgcgggacctgcggatcaaccggatcttcgaagggtccagtgagatcatgcggctgctcatcgcgcgtgaagcggtcgacgcgcacctcactgccgcgggtgatctggcgaaccctaaggccgatctgcggcagaaggccgcggcggcggccggcgccagcgggttctacgcgaagtggttgccgaagctggttttcggcgaaggccaactacccacgacgtaccgcgagttcggcgccctggcgacacatctgcgttttgtcgaacgctcgtcacgcaaattggcccgcaacaccttctacgggatggcgcgctggcaggccagcctggagaaaaagcaagggttcctcggccgcatcgtggatatcggcgccgagctattcgccatctccgcggcgtgtgtgcgcgccgaggcgcagcgaacggccgatccggtcgagggtgagcaggcatacgaactggccgaggcgttctgccagcaggccacgttgcgggtggaggcgctgttcgacgcgttgtggtccaacaccgacagcatcgacgttcggctggcaaacgatgtgctggagggccgctacacctggctggagcaagggatactcgatcagtccgaaggcaccggaccgtggatcgcgtcctgggaaccgggtccatccaccgaggccaatctggctcggcggttcttgacggtgtcgccatcgagcgaagcgaaactttag

SEQ ID NO: 133 - DNA, 489 bp, Mycobacterium Tuberculosis
gtgaagcgcggtgtcgcaacgctgccggtgatcctggtgattctgctctcggtggcggccggggccggtgcatggctgctagtacgcggacacggtccgcagcaacccgagatcagcgcttactcgcacgggcacctgacccgcgtggggccctatttgtactgcaacgtggtcgacctcgacgactgtcagaccccgcaggcgcagggcgaattgccggtaagcgaacgctatcccgtgcagctctcggtacccgaagtcatttcccgggcgccgtggcgtttgctgcaggtataccaggaccccgccaacaccaccagcaccttgtttcggccggacacccggttggcggtcaccatccccactgtcgacccgcagcgcgggcggctgaccgggattgtcgtgcagttgctgacgttggtggtcgaccactcgggtgaactacgcgacgttccgcacgcggaatggtcggtgcgccttatcttttga

SEQ ID NO: 134 - DNA, 789 bp, Mycobacterium Tuberculosis
gtgaccgggcccaccgaggagtctgccgtggcgactgtggccgactggcccgaggggttagcggcggtgctcaggggtgcggccgaccaagccagggccgccgttgtggagttcagcggcccggaggcggtgggagactacctgggcgtcagctacgaggatggcaacgccgccacccaccggttcatcgcgcatctgcctggctaccagggatggcaatgggccgtcgtggtggcgagctattccggtgcggaccatgccacgatcagcgaggtggtgctggtcccggggcctaccgcactgctggcgccggattgggtgccgtgggagcaacgggtgcggccgggagacttgagccccggagatctgctggcgccggcgaaggatgatccgcggctggttccgggttacaccgccagtggtgatgcgcaggttgacgagaccgccgcagagatcgggttgggtcggcgctgggtgatgagcgcctggggtcgcgcccagtcggcccaacggtggcacgacggcgactatggtcccggctctgctatggcgcggtcgacgaaacgcgtctgccgcgactgcggtttcttcctgccgctggccgggtcgctgggcgcaatgttcggggtatgtggtaacgaactgtccgctgacgggcatgttgtcgataggcaatacggctgtggcgcccattccgacaccactgcgccggccggtggcagcacacccatttatgagccgtacgacgacggtgtgctcgacatcatcgagaagccggctgaatcatag

SEQ ID NO: 135 - DNA, 1122 bp, Mycobacterium Tuberculosis
atgacagtggtcccggagaatttcgtccccggcctcgacggcgtggtggcctttacgaccgagatcgccgagccggacaaagacggcggggccctgcgctaccgtggcgtcgacatcgaagacctggtaagtcagcgggtcaccttcggcgatgtgtgggcgctgctggtggacggcaacttcggcagcgggctgccgccggctgaaccgttcccgctgccgattcactccggcgatgtgcgcgtcgacgtccaggccggcctggcgatgctggcgcccatctggggatatgcgccgctgctcgacatcgacgacgccaccgcccgccaacagctggcccgggcatcggtgatggcgctgtcctatgtcgcgcaatccgcacggggcatctaccagccggcggtcccgcagcgaatcatcgatgaatgctcgacggtcacagcacgtttcatgacgcgctggcagggcgagccagaccccagacacatcgaggccattgacgcctactgggtgtcggccgccgagcacggcatgaacgcttcgacattcaccgcgcgtgtgatcgcctcaactggggcggatgtggcagcagcgctgtcgggcgcaatcggggcgatgagcggaccgctgcatggtggcgcgccggcgcgcgtcctgccgatgctcgacgaggtcgaacgcgccggcgatgcccgcagcgtggtcaagggaatcctggaccgcggcgagaaactgatggggttcgggcaccgggtctaccgcgccgaggacccgcgggcgcgggtgctgcgggcggccgccgagcggctgggcgccccccgctacgaggtcgcggtcgcggtggagcaggctgcgctgtcagaactgcgagagcgccgtccggatcgggcgatcgagaccaatgtcgaattctgggccgcagtggtcctggactttgcccgggtaccggccaacatgatgccagcaatgttcacctgtgggcgcactgccggctggtgtgcccacattctcgagcagaagcgactcggcaagctggtccgcccgtcggccatttacgtgggaccgggcccgcgcagcccggaatcggtcgacggctgggagcgggtactcaccaccgcctga

SEQ ID NO: 136 - DNA, 153 bp, Mycobacterium Tuberculosis
atggattttgtgatccagtggtcgtgctacctgctggcgttcctggggggctcggctgttgcctgggtagtcgtcactctgtcgatcaagcgcgccagccgtgatgagggtgctgcggaggcgcccagtgcagccgagacaggcgcacagtga

SEQ ID NO: 137 - DNA, 528 bp, Mycobacterium Tuberculosis
atggaacacgtgcactggtggctggcgggcctggcgttcacgctcgggatggtgctgacgtcgacgctgatggtccggcccgtcgaacatcaagtgctggtaaagaaatcggtccgcgggtcaagcgctaagtccaagccgccaacggcgagaaaacccgccgtcaagtcgggcaccaagagagaggagtcgccgacggcgaagaccaaggtggcaacggagtctgctgcggagcagatcccggttgccggggagcccgcggcggagccgatcccggtcgccggcgagccggcggcgcgtattccggtggttccgtacgcgccgtacggcccgggctcggcgcgcgctggtgccgatggcagcggaccgcaggggtggctggtgaagggccgctcggacaccaggctctactacactcccgaagatccgacgtacgaccctactgtcgcccaggtttggttccaggacgaggagtcggcagcgcgggcgtttttcacgccgtggcgcaagagcacacggcggacatga

SEQ ID NO: 138 - DNA, 1119 bp, Mycobacterium Tuberculosis
atggtgcgccgagcgctacgactggcggccggcaccgcctcgctggccgccggcacgtggctgttgcgtgcgctgcacggcacgccggccgcgctcggtgccgacgcggcgtcgatcagggctgtgtcggagcaatcgccgaactatcgtgacggcgccttcgtcaacctggatcccgcgtcgatgttcaccctggatcgcgaggagcttcggctcatcgtgtgggagttagtggccagacacagtgcgagccggccggcggcgccgatcccgttggcctcgccgaatatctaccggggtgacgccagccggctcgccgtcagctggttcggtcactcgacggcgctgctggaaatcgacggctaccgggtgcttaccgatccggtgtggagcgatcggtgctcaccgtccgacgtcgtcggcccccagcgcctgcatccgccgccggtgcaactggcagctctcccggccgtcgacgccgtggtcatcagccacgaccactacgaccatctcgatatcgacaccgtggttgcgctggtcggcatgcaacgggccccgttccttgtgccgctcggggtcggcgcccaccttcggtcgtggggtgttccgcaggatcgcattgttgagctcgactggaaccagagcgctcaggtcgatgagctcaccgtggtctgcgtgccggcacggcacttctcgggacggttcctgagccgcaacaccacactgtgggcctcgtgggcgtttgttgggccgaaccatcgcgcctacttcggcggtgataccggatacaccaagagcttcacccagatcggcgcggaccacggaccgttcgacctgaccctgctgcccatcggggcctacaacacggcgtggccggacatccacatgaaccccgaggaggcggtccgggcgcacctggacgtcaccgattcgggctcgggaatgctggtgccggtgcactggggcaccttccggctggccccccatccgtggggcgagccggtcgagcggctgctcgcggcggctgaacccgagcacgtcacggtagccgtgccgctacccggtcagcgggtcgacccgaccgggcccatgagattgcacccatggtggcggctgtaa

SEQ ID NO: 139 - DNA, 975 bp, Mycobacterium Tuberculosis
gtggtcaccgagccgctcacaaagccggcgctagtggcggtcgacatgcgccccgcgcggcgcggcgagcggctgttcaagctggccgcgtcggccgccggttcgacgatcgtcatcgcaatcctgctgatcgcgatattcctgttggtccgcgccgtgccgtcgttgcgggcgaatcacgccaatttcttcaccagtacccaattcgacacgtcggacgatgagcagctggcgtttggtgtccgggacttgttcatggtcacggcgttgagttcgataacggctctggtgttggcggtgccggtggctgtcgggatcgcggtgttcctcacccactacgcgccgaggagactgtcgcgtccattcggcgcgatggtggatctactggccgcagtgccgtcgatcatcttcgggttgtgggggatctttgtgctggcgcccaagctcgagccgatcgcgaggtttctcaatcgcaacttgggctggttgttcctgtttaagcagggcaacgtgtcgttggccggcggcggcacgattttcaccgcgggcatcgtgctgtcggtgatgatcctgcctatcgtcacatcgatatcacgcgaagtgttccggcagactccgctgatccaaatcgaagcagcgctggcgctaggcgcgacgaaatgggaggtagtgcggatgaccgtgctgccatacgggcgaagcggggtggtcgcggcctccatgctgggtttggggcgggctctgggcgaaaccgtggccgtgctggtcatcctgcgctcggccgcgcggccggggacctggtcgctgttcgacggcggttatacgttcgcttccaagatcgcctccgctgcttcagaattcagcgaaccgctgccgaccggagcctatatttcggcgggatttgcgttattcgtgctgacgttcctggtcaatgcggccgctcgcgcaatcgccggcgggaaggtcaacgggtga

SEQ ID NO: 140 - DNA, 906 bp, Mycobacterium Tuberculosis
atgggcgaatcggctgagtccgggtcccggcagctaccggcgatgtccccgccgcggcgatcggtagcctatcggcgcaagatcgtcgatgccctgtggtgggcggcgtgcgtgtgttgtctggcggtggtgatcaccccgacgttgtggatgttgatcggagtcgtcagccgcgctgtaccggttttccactggagtgtgctggtgcaggactcccagggcaatggcggcggcttgcgcaacgccatcatcggtaccgcagtgttggccatcggggtgatcctggtgggtggcacggtgagtgtgttgaccgggatttatctgtccgaattcgccaccggcaaaacacggtccattctgcgcggcgcctacgaggtgttgtccggtattccgtcgatcgtgctcggctacgtcggctatttggccctggtggtgtacttcgattgggggttttcgctggcggccggggtgttggtgctgtcggtgatgagcattccctacatcgccaaggccaccgagtccgcgctggcccaggtgccgacgtcgtatcgggaagcggctgaggcactcgggttaccagccggctgggcgctgcgcaagatcgtgctgaagacggcgatgcccggaatcgtcaccgggatgttggtcgcgctggccctggcgatcggcgagacggcgccgctgctgtacacggcggggtggtcgaattcgccgccgaccggacaactcaccgactcgccggtcggctacctgacctacccaatttggacgttctacaaccagccatccaagtcggctcaggatctgtcctatgacgcggctctcttgctgatcgtgttcctgctgctattgatcttcattggccggttgatcaactggctgtcacggaggcgttgggacgtttga

SEQ ID NO: 141 - DNA, 2280 bp, Mycobacterium Tuberculosis
atgggttcggcgtcggagcaacgggtgacgctgaccaacgccgacaaggtgctctatcccgccaccgggaccacaaagtccgatatcttcgactactacgccggtgttgccgaagtcatgctcggccacatcgcgggacggccggcgacgcgcaagcgctggcctaacggcgtcgaccaacccgcgttcttcgaaaagcagttggcgttgtcggcgccgccttggctgtcacgtgcaacggtggcgcaccggtccgggacgacgacctatccgatcatcgatagcgcaaccgggctggcctggatcgcccaacaggcggcgctggaggtgcacgtgccgcagtggcggtttgtcgccgagcccggatcaggtgagttaaatccgggcccggcaacgcgtttggtgttcgacctggacccgggcgaaggcgtgatgatggcccagctggccgaggtggcgcgcgcggttcgtgatcttctcgccgatatcgggttggtcaccttcccggtcaccagcggcagcaagggattgcatctgtacacaccgctggatgagccggtgagcagcaggggagccacggtgttggccaagcgcgtcgcgcagcgattggagcaggcgatgcccgcgttggtcacctcgaccatgaccaaaagcctgcgggccgggaaggtgtttgtggactggagccagaacagcggctcgaagaccaccatcgcgccgtactcactacgtggccggacgcatccgaccgtcgcggcgccacgcacctgggcggagctcgacgaccccgcactgcgtcagctctcctacgacgaggtgctgacccggattgcccgcgacggcgatctgctcgagcggctggatgccgacgctccggtagcggaccggttgacccgataccgccgcatgcgcgacgcatcgaaaactcccgagccgattcccacggcgaaacccgttaccggagacggcaatacgttcgtcatccaggagcatcacgcgcgtcggccgcactacgatttccggctggaatgcgacggcgtgctggtctcgtgggcggtaccgaaaaacctgcccgacaacacatcggttaaccatctagcgatacacaccgaggaccacccgctggaatacgccacgttcgagggcgcgattcccagcggggagtacggcgccggcaaggtgatcatctgggactccggcacttacgacaccgagaagttccacgatgacccgcacacgggggaggtcatcgtgaatctgcacggcggccggatctctgggcgttatgcgctgattcggaccaacggcgatcggtggctggcgcaccgcctaaagaatcagaaagaccagaaggtgttcgagttcgacaatctggccccaatgcttgccacgcacggcacggtggccggtctaaaggccagccagtgggcgttcgaaggcaagtgggacggctaccggttgctggttgaggctgaccacggcgccgtgcggctgcggtcccgcagcgggcgcgatgtcaccgccgagtatccgcaattgcgggcattggcggaggatctcgccgatcaccacgtggtgctggacggcgaggccgtcgtacttgactcctctggtgtgcccagcttcagccagatgcagaatcggggccgcgacacccgtgtcgagttctgggcgttcgacctgctctacctcgacggccgcgcgctgctaggcacccgctaccaagaccggcgtaagctgctcgaaaccctagctaacgcaaccagtctcaccgttcccgagctgctgcccggtgacggcgcccaagcgtttgcgtgctcgcgcaagcacggctgggagggcgtgatcgccaagaggcgtgactcgcgctatcagccgggccggcgctgcgcgtcgtgggtcaaggacaagcactggaacacccaggaagtcgtcattggtggctggcgcgccggggaaggcgggcgcagcagtggcgtcgggtcgctgctcatgggcatccccggtccaggtgggctgcagttcgccgggcgggtcggtaccggcctcagcgaacgcgaactggccaacctcaaggagatgctggcgccgctgcataccgacgagtcccccttcgacgtaccactgcccgcgcgtgacgccaagggcatcacatatgtcaagccggcgctggttgcagaggtgcgctacagcgagtggactccggagggccggctgcgtcaatcaagctggcgtgggctgcggccggacaagaaacccagtgaggtggtgcgcgaatga

SEQ ID NO: 142 - DNA, 477 bp, Mycobacterium Tuberculosis
gtggccgggacgccgcagccgcgcgcgctcgggcccgatgcgctggacgtcagcaccgacgacctggccgggctgttggccggcaacaccggccggatcaagaccgtcatcaccgaccagaaggtaattgccggcatcggcaacgcctatagtgacgaaatcctgcacgtcgcgaagatctcgccgttcgccacggccggcaagttatccggcgcacagctcacctgcctgcatgaggcgatggcgtcggtgctgtcggacgcggtgcgccggtccgtcggccagggcgcggccatgctcaaaggggagaaacgttctgggcttcgagtacatgcgcgcaccgggttaccctgcccagtgtgcggtgacaccgtgcgggaggtgtccttcgcggacaagtcttttcagtactgtccaacgtgtcagaccggtggcaaggcgctggccgaccggcgtatgtcgcggctgctcaagtag

SEQ ID NO: 143 - DNA, 1662 bp, Mycobacterium Tuberculosis
atgacctccgcgccaatccccgacatcaccgctaccccggcatgggacgccctgcgcagacatcacgatcagatcggaaacacccatcttcgccagttcttcgccgacgatccgggtcgcggccgggagctcaccgtcagcgtcggcgatctctacatcgactacagcaaacaccgcgtcacccgcgagacgctggcgctgctgatcgatctggcccggacggcccacctcgaagagcgtcgcgaccagatgttcgccggtgtgcatatcaacacctctgaggatcgagcggtgttgcacaccgcgctgcggctgccccgagacgccgaactcgtcgtcgacggccaagacgtcgtcaccgacgtacatgccgtgctcgacgcgatgggcgccttcaccgaccgcctgcgcagcggcgagtggaccggagcaactggaaagcggatcagcaccgtcgtcaacatcggcatcggtggttcggatttgggtccggtgatggtgtaccaagcgttgcgccactatgccgacgcgggcatttccgcgcgcttcgtgtccaacgtcgatcccgccgacctgatcgccacgctcgccgatctagaccccgccacaacgcttttcatcgtcgcgtcgaagacgttctcgacgctggagacattgaccaatgcgaccgcggcgcgtcgctggctgaccgatgcgctgggcgacgccgcggtgtcgcggcattttgtcgcggtgtccaccaacaagcgcctggtcgacgacttcggcatcaacaccgacaacatgttcggtttttgggattgggtcggcgggcgttattcggtggattcggcgatcgggctgtcgttgatgacggtgatcggccgcgacgccttcgccgatttcttggccggattccacatcatcgaccgccatttcgcgaccgctccgctggaatccaacgcgccggtgctgcttggcctgatcggactgtggtactccaatttcttcggtgcgcaatcacgcaccgtgctgccgtattccaatgacttgtcgcgttttccggcctaccttcagcagttgaccatggaatccaacggcaagtccacgcgcgccgacggcagcccggtcagcgccgacaccggtgaaatcttttggggtgaaccgggaaccaacggccagcacgccttctaccagttgctgcaccagggcacccggctggtgccagccgatttcatcggctttgctcaacccctcgacgacctgccgaccgccgagggcaccggcagcatgcatgatctgctgatgagcaacttcttcgcccaaacccaggtgctggcgttcggcaagaccgccgaggagatcgccgccgacggcacccccgcccacgtggtagcgcataaggtgatgcccggcaaccggccgtccacctcaattctggccagtcggctcacgccgtcggtgctggggcagttgatcgcgctctacgagcatcaggtgttcaccgagggtgtggtgtggggtatcgactcgttcgaccagtggggggtggagctgggcaagacgcaggccaaggcgctgcttccggtaatcaccggcgccggttcaccgccaccgcagtcggacagctcgaccgacgggctggtgcgccgctaccgcaccgaacgtggccgcgcgggctag

SEQ ID NO: 144 - DNA, 1380 bp, Mycobacterium Tuberculosis
atgtcacccagtaacctgccccgcaccgtgggcgagctgcgtgccgccggtcatcgggaacggggggtcaagcaggaaatccgggaaaatctgctgaccgcgctggccgacggcgacaacgtctggccgggcatcctgggtttcgacgacaccgtgattccccaggtggagcgggccttgatcgccggtcacgactttgtcctgctcggcgaacgcggccagggcaagacccggctgctgcgcgcactcgcgggtctgctggacgagtggacgccggtgatcgccggcgccgaactgggcgagcacccctacacgccgatcacgccggagtcgatccggcgggccgcgcagctcggcgacgacctaccggtggcgtggaagcaccgcagcgagcgctacaccgagaagctggccacccccgacaccagcgtcgccgacctggtcggcgacgtcgacccgatcaaggttgccgagggccgcagcctcggggatcccgaaaccatcgcctacgggctcatcccgcgggcgcaccgcggcatcgtcgcggtcaacgagctgcccgacctcgccgaacgcatccaggtgtcgatgctcaacgtcatggaggagcgcgacatccaggtccgcggctacacgctgcggctgccgctggatgtgttggtggtcgccagcgccaaccccgaggactacaccaaccgtggccgcatcatcacgcccatcaaggaccggttcggcgccgagatccgcacccactacccactggagctggaggcggagatgggcgtcatcgtccaggaggcgcacctgagtgcacaggtgtccgactacctgatgcaggtgctcgcgcggtttgcccgttacctgcgagaatcccgctcgatcgatcagcgctccggggtgtcggcgcggtttgccatcgcagcggccgaaaccgtggcggctgccgcccggcaccgcggggcggtgctgggggagacagacccggtggcccgggtggtcgatttgggcacggtgatcgacgtgctgcgcggcaagctggaattcgagtccggcgaggagggccgcgaacaggcggtgctcgagcatctgttgcgtcgcgccaccgccgataccgcgtcccgggtgctgggcggtatcgacgttggctcgttggtgaccgcggtcgagggcggttcggcggtgacgacgggcgagcgggtctcggccaaggatgtgctggcggcggtgccgggcctgccggtggtggacaggatcgcgcgcaagctgggcgccgaatccgagggggagcgtgccgcggcactggaactggcgttggaggcgctatacctggccaagcgcgttgacaaggtctgcggggagggccagaccgtctatggctaa

SEQ ID NO: 145 - DNA, 2019 bp, Mycobacterium Tuberculosis
atggctaagtctgatggtgacgacccgctgcgcccggcttcgccgcgcttgcgatcgtcacgacggcactcgctacgctactcggcgtacaccggcgggcccgacccgctggccccgccggtggatctgcgggatgcgctggaacagattggccaagacgtcatggcgggcgcctcgccgcgccgggcgctgtccgagctgctgcggcggggcaccaggaacctgaccggcgccgaccggctggcggccgaggtgaaccgccgccgacgggagttgttgcgccgcaacaacttagatggcaccttgcaggagatcaagaagctgctcgacgaggccgtgctggccgaacgcaaggagctggcccgcgcgctagacgacgacgcccgcttcgccgagctgcagctggacgcgcttccggcctcgccggccaaggcagtacaggagctggccgaataccgctggcgcagcgggcaggcccgcgaaaagtatgagcagatcaaggatttgctcggccgtgagctgctcgaccaacgctttgccggcatgaagcaggcgcttgccggtgccaccgacgacgatcgccggcgggtcaccgagatgctcgacgacctcaacgacctgttggataagcacgcccgcggtgaagatacgcagcgggacttcgacgagttcatgaccaagcacggcgagttcttcccggagaacccgcgcaacgtcgaggagctgctggactcgctggccaagcgagccgccgccgcgcagcggttccgcaacagcctgagccaggaacagcgggacgagctggacgcgttggcgcagcaggcatttggctctccggcgttgatgcgggcgctggaccgtttggatgcgcatctgcaggccgcccgtcccggcgaagactggaccggctcgcagcagttctccggtgataatccgttcggcatgggggaaggcacccaggcgctggccgacattgccgagctggagcagctggccgagcagctgtcgcagagctatccgggcgccagcatggacgatgtcgacctggacgcgctggcccgtcagctcggcgaccaggccgccgtcgacgcccggacgctggctgaattggaacgcgcgctggtcaatcagggcttcctggaccgcggttccgacggccagtggcggctctcgccgaaggccatgcgccgcctcggcgaaacggcgttacgcgatgtggcgcaacaactttccgggcgccacggcgagcgtgatcaccggcgtgccggcgccgcgggcgagctgaccggtgcgacgcggccctggcagttcggcgacaccgagccgtggcacgtcgcccgcacgctgaccaatgccgtgctgcgccaagccgcggccgtgcatgaccgcatccggatcaccgtcgaggatgtcgaggtcgccgagaccgaaacgcgcacccaggccgctgttgcgttgttggtggacacctcgttttcgatggtgatggagaatcgctggttgccgatgaagcgcacggcgctggcgctgcaccacctggtgtgcacccggttccgctcggatgccttgcagatcatcgcgtttgggcgctacgcccgcacggtgacggcggccgagctgacggggttggcgggtgtctacgagcagggcaccaacctgcaccatgcgctcgcgctggccggccggcacctgcgccggcacgcaggcgcccagcccgtggtgctggtggtgaccgacggcgagccgaccgcccacctggaggacttcgacggcgacggtacgtcggtgttctttgattacccgccccatccgcgcaccatcgcccacaccgtgcgcgggtttgacgacatggcgcggctgggtgcgcaggtgacgatcttccggttgggcagtgaccccggtctggctcggttcattgaccaggttgcgcgacgggtgcagggccgcgtggtggtgcccgatctcgacgggctgggcgcggcggtggtgggcgactacctgcgcttccggcggcgctag

SEQ ID NO: 146 - DNA, 546 bp, Mycobacterium Tuberculosis
atgaaggtcgccgcgcagtgttcaaagctcggatatacggtggcacccatggaacagcgtgcggagttggtggttggccgggcacttgtcgtcgtcgttgacgatcgcacggcgcacggcgatgaagaccacagcgggccgcttgtcaccgagctgctcaccgaggccgggtttgttgtcgacggcgtggtggcggtgtcggccgacgaggtcgagatccgaaatgcgctgaacacagcggtgatcggcggggtggacctggtggtgtcggtcggcgggaccggggtgacgcctcgcgatgtcaccccggaagccacccgcgacattctggaccgcgagatcctcggtatcgccgaggccatccgcgcgtccgggctgtccgcgggaatcgtcgacgccgggttgtcgcgcggcctggcgggtgtctccggcagcacgctggtggtcaacctcgcgggttcgcgttatgcggtgcgcgatggaatggcgacgctgaatccgctagcggcacagatcatcgggcagttgtcgagcttggagatctga

SEQ ID NO: 147 - DNA, 333 bp, Mycobacterium Tuberculosis
gtgccaacctacagctacgagtgcacccagtgcgccaaccgcttcgatgttgtgcaggccttcaccgacgatgcgctgaccacgtgcgagcggtgttctggccggctgcgcaagctgttcaatgcggtcggcgtggtgttcaaaggcaccggcttctaccgcaccgacagccgcgagtcgggcaagaagtccaagagccagaccaacggatcctcgaccagcgagtcgacgaagagttcggggagttcggggagttctggctcgagtgaaagcaaggcttcggggtcaaccgagaagtcaaccagctccacaaccgccgccgcggccgtctga

SEQ ID NO: 148 - DNA, 921 bp, Mycobacterium Tuberculosis
atgtcacgcccagaagtactaacgccgttcacggcaatcgtcccggcagccggcctgggtacgcgctttctgccggccaccaagacggtgcccaaggagctgctgcccgtcgtcgacactcccggtatcgagctggtggccgccgaggcggccgcggccggtgccgaacggctggtgatcgtcacctccgagggtaaggacggggtggtcgcgcatttcgtggaagacctggtgctggagggcacgctcgaggcccgaggcaagatcgccatgctggccaaggtgcgtcgcgccccggcactgatcaaggtcgaatccgtggtgcaggccgagccgctgggactgggacacgccatcggctgtgtggagccgacgctgtcgcccgacgaagacgctgtcgcggtgctgctgcctgacgacctggtgctgccgaccggcgtcctggagacgatgtcgaaggtgcgagccagcaggggcggcaccgtgctgtgtgctatcgaggtggcgcgcgaggagatcagtgcctacggggttttcgatgtcgagccggtccccgatggtgactacaccgacgatcccaacgtgctgaaggtcaggggcatggtcgaaaagcccaaggccgaaacggcgccgtcgaggtatgcggcggccggccgctacgttctagaccgtgccatcttcgatgcgttacgccgcatcgaccagggtgcaggcggtgaagtgcagctcaccgatgcgatcgcgctgctgattgccgagggccatcccgtccatgtcgtcgtccaccaagggtcccgacacgacctgggaaatccgggcgggtacctcaaggctgcggttgactttgcattggatcgtgacgactacggcccggacttgcggcgatggttggtggcgcgactgggtctgacagagcagtag

SEQ ID NO: 149 - DNA, 1002 bp, Mycobacterium Tuberculosis
ttggacgggatagccgaattgaccggcgcacgagtcgaagatcttgcggggatggacgtctttcagggatgtccggccgagggtctggtgtcattggcggcgagcgttcagccgttgcgggccgctgccggccaggtgctgctgcggcagggcgagccggcggtttcgtttctgcttatctcgtcgggtagcgcagaagtcagccatgttggcgacgatggtgttgcgatcatcgctcgggcgctgccgggcatgatcgtcggcgaaatcgcgctgctgcgcgatagcccgcgcagcgcgacggtcaccaccatcgagccgctgaccggctggacgggtggccgcggcgctttcgccacaatggtgcacatccccggggtcggtgagcgattgctgcgcaccgccaggcagcgtctcgccgccttcgtctccccgattccggtacggcttgccgacgggactcaactgatgctacgccccgtgctgcccggtgaccgcgagcggaccgtgcacggacacatccagttctccggcgagacgctgtatcgacggttcatgtcggctcgtgttcccagtccggcgttgatgcactacctgtcggaagtcgactacgtcgaccacttcgtctgggtggtgaccgacggaagcgaccccgtagccgacgcgcgttttgtgcgggatgaaaccgatccgacggtcgccgagatcgcgttcacggttgccgacgcgtatcagggcagggggattggaagctttctcatcggtgcgttgtccgtggccgcccgggtcgacggcgtcgaaaggtttgccgcgcgcatgctttccgacaatgtgccgatgcgaacgatcatggaccgctacggggcggtgtggcagcgcgaggacgtcggagtcatcaccaccatgatcgatgtgccgggtccgggtgagctgagcttggggcgcgagatggtcgaccagatcaaccgggtagcccggcaagtgatcgaggccgtcggctga

SEQ ID NO: 150 - DNA, 618 bp, Mycobacterium Tuberculosis
atgtgcgataagcttggcggcgtggcgatcgcggttcaaggcgcgctcttcgagcacaacgagcgaagacagctcggcgacggagcctttatcgacatccgttcgggctggctgaccggcggcgaagaactgctggacgcgttgttgtcgacggtgccgtggcgagccgagcgccgtcagatgtacgaccgggtggtcgatgtgccgcggctggtgagttttcacgacctgaccatcgaagatccgccgcatccgcagctggcgcggatgcgccggcggctcaacgacatctacggcggcgaactgggtgagcccttcaccaccgccgggctgtgctactaccgcgacggctctgacagcgtcgcctggcatggcgacaccattggtcgcggcagcactgaggacactatggtggcgatcgtcagcctcggcgccacccgcgtcttcgcgctgcggccgcgtggccgcggtccatcgttgcgactgccgttggcgcatggcgatctattggtgatgggcggatcgtgtcaacgcaccttcgagcatgcggtgcccaagacatcggcgccgacgggtccgcgcgtgagcatccagttccggccgcgcgacgtccgctaa

SEQ ID NO: 151 - DNA, 858 bp, Mycobacterium Tuberculosis
atgtcctctggtcgcctgttgctcggcgccaccccgctgggccagccgtcggatgcgtcaccacgcctggcggccgcgttggccaccgccgatgtggtggcggccgaggacacccggcgggtgcggaaattggccaaggctcttgacatccggattggtggacgggtggtcagcctgttcgaccgggtggaggcgttgcgcgtgacggcccttctcgacgcgatcaataacggtgcgacggtgctggtggtcagtgacgccgggaccccggtgatcagcgatcccggctatcggctggtcgcggcgtgcatcgacgcgggggtttcggtgacgtgtttacccgggccgtccgcggtgaccaccgcgctggtgatgtccggtctgccggcggagaagttctgcttcgagggtttcgccccgcgcaagggtgcggcgcgccgggcctggctggccgaactggccgaggagcggcgcacctgtgttttcttcgaatccccgcgccggttggctgcgtgccttaacgatgccgtcgagcagctcggtggtgcccgtccggcggcgatctgccgggagctgaccaaggtgcatgaggaagtggtgcgcggatcgcttgacgagttggcgatctgggcggccggtggtgtgctcggcgagatcaccgtggtggtggcgggcgccgccccccacgccgaactgtcgtcgctgatagcccaagtggaggagttcgtcgcggcgggtattcgtgtcaaggacgcctgcagcgaggtagcggcggcacatccgggggtgcgcacccgccagctttacgacgcggtgctgcaatcacggcgggaaaccggcgggccagcgcagccgtag

SEQ ID NO: 152 - DNA, 93 bp, Mycobacterium Tuberculosis
atgactacggtcgacaacatcgtcgggttggtgatcgcggtggcgctaatggcgttcctattcgcggcgctgctgtttccggagaagttctga

SEQ ID NO: 153 - DNA, 2130 bp, Mycobacterium Tuberculosis
gtgatgatcgcacgcatggagacctccgcaaccgccgcggcagcgacgtcggcaccccggctccggctggccaagcgctcgctgttcgatccgatgattgtgcgctcggcgctgccccagagcctgcgcaagctggctccgcgggtacaggcccgtaacccggtcatgttggtcgtgctggtcggtgccgtgatcaccacactggcgttcctgcgcgacctcgcatcctcgacagcccaagagaacgtcttcaacggtctggtcgccgcgttcctctggttcaccgtcctgtttgccaactttgccgaggccatggccgaaggacgcggcaaggctcaggcggcggcgctgcgcaaagtccggtccgaaacgatggccaaccggcgcacggctgcgggcaacatcgaatcggtcccttcgtcgcggctggacctcgacgacgtggtggaggtttcggctggcgaaacgatcccgtcggacggcgagatcatcgaaggcattgcctccgtcgacgagtctgcgatcaccggcgaatcggcaccggtgatccgcgagtcgggcggcgaccgttccgcggtgacgggtggcaccgtggtgctgtcggatcggatcgtcgtgcggatcaccgccaagcagggacaaacattcatcgaccggatgatcgcgctggtggagggcgccgcacggcagcagacaccgaacgagatcgcgctgaacatcctgctggctgggctgacgatcatctttttgctcgcggtggtgacgctgcagccgttcgccatctattccggcgggggacagcgggtggtcgtgctggtggcgttgctggtgtgtctcattccgaccacgatcggtgcgctgctgtccgcgatcggcatcgcggggatggaccggctggtgcaacacaacgtgctcgccacatctgggcgggcggtggaggcggccggcgacgtgaacacgctgctgctggacaagaccggcaccatcaccctcggtaaccggcaggccaccgagttcgtgccgatcaacggtgtgagtgccgaggcggtcgccgacgccgcccagctgtcgagcttggccgacgaaactccggagggccgctcgatcgtcgtgctggcgaaggacgagttcgggctgcgcgcccgcgacgagggcgtgatgtcacacgccaggttcgtgccgttcaccgccgaaacccggatgtccggggtcgatctcgccgaggttagcggcatccgtcggatccgcaagggtgccgcggctgcggtgatgaagtgggttcgcgatcacggtggccaccccaccgaggaggtgggtgccattgtcgacggcatcagctccggcggggggacacccctagtcgttgcggaatggaccgataacagcagcgcgcgggccatcggcgtcgtccatctgaaggacatcgtcaaggtgggcatacgggaacgcttcgacgaaatgcgccgaatgagcatccgcaccgtgatgatcaccggtgacaacccggcgaccgccaaggcgattgcacaggaggccggcgtcgacgatttcttggccgaggccacgcccgaggacaagcttgcgctcatcaagcgcgaacagcagggcggtcggctggtcgccatgacgggtgacgggaccaatgacgcacccgcgctcgcgcaagccgatgtcggggtggcgatgaataccggcacccaggcggcccgggaagccggcaacatggtcgatctcgactccgaccccaccaagctcatcgaggtcgtggagatcggcaagcagctgctgatcacgcggggcgcgctgacgacgttttcgatcgccaacgacgtcgcgaagtacttcgccatcatccctgccatgttcgtcggcctgtatccggtgctcgacaagctgaacgtcatggcgctgcactcaccaaggtcggcgattctgtcggcggtcatcttcaatgcgctggtgatcgtcgccttgatcccattggcgttgcggggcgtgcggtttagggcggaaagcgcgtcggcgatgctgcggcgcaacctgctgatctatgggctgggcggtctcgtcgtcccgtttatcggcattaaactggtcgatctcgtcatcgtcgccctcggggtgtcctga

SEQ ID NO: 154 - DNA, 339 bp, Mycobacterium Tuberculosis
ttgatccccggtcggatggtgctgaactgggaagatggcctcaatgcccttgttgcggaagggattgaggccatcgtgtttcgtactttaggcgatcagtgctggttgtgggagtcgctgctgcccgacgaggtgcgccgactgcccgaggaactggcccgggtggacgcattgttggacgatccggcgttcttcgccccgttcgtgccgttcttcgacccgcgcaggggccggccgtcgacgccgatggaggtctatctgcagttgatgtttgtgaagttccgctaccggctgggctatgagtcgctgtgccgggaggtggctgattcgatcacctga

SEQ ID NO: 155 - DNA, 882 bp, Mycobacterium Tuberculosis
gtgaccaagccctattcgtcgccgccaacgaacctgcgctcactacgagatcggctcacccaagtagcggaacggcaaggtgtcgtgttcggtcgactgcagcggcatgtcgcgatgattgttgtcgcacagttcgcggccacgctcaccgacgacaccggcgctccgctgctgttggtcaaaggcggatcgtcgctggaactgcgccggggaattcccgattcgcggacctccaaagacttcgacacggtcgcacgtcgcgatatcgaattaatccatgaacagctcgctgacgcgggcgagacggggtgggaaggattcactgcaatcttcaccgcccccgaagaaatcgatgttcctggtatgccggtcaagccgcgccgattcaccgccaagctgagctaccgaggccgggctttcgcaactgttccgatcgaggtctcctccgtcgaagccggcaatgccgaccaattcgacaccctcacctcagacgcgctcggcctcgtgggcgtacccgcagcagtcgccgtaccctgcatgaccattccctggcaaatcgcgcagaagctgcacgcagtaactgccgtgctcgaagaaccgaaggtcaacgaccgcgctcacgacctggtggacttgcagcttcttgaaggactgttgctcgatgccgacctcatgccgacgcgcagcgcgtgcatcgcgatattcgaagcgcgcgcccagcatccttggccaccgagagtcgccacgctgccgcactggccgctgatctatgcaggtgcgctggaggggcttgaccaccttgaactcgccaggacggtcgacgcggcggcccaggcagtgcagcgattcgttgcgcggattgatcgggcgacgaaaagatga

SEQ ID NO: 156 - DNA, 1392 bp, Mycobacterium Tuberculosis
atgtcctacatgattgcggtgccagacatgctcagctcggcggctggggatttggccagcatcggatcgtcgatcaatgcctcaacgagggcggccgcggccgcgacgacgaggttgttgccggccgccgccgacgaagtgtcggcccacattgcggcactgtttagcggacatggcgagggctatcaggcgatcgcccggcagatggcagcgtttcatgaccagttcacgctggccctgacgtcaagtgcgggcgcgtatgccagcgccgaggcgaccaacgtcgaacagcaggtgctgggtttgatcaacgcgcccacccaggcgctgttggggcgtccgctgatcggcaacggcgccgatgggaccgcggccaatcccaacggtggcgccggtgggttgttgtacggcaacggcggcaacgggttttcccaaaccaccgccgggctcaccgggggtaccggcgggtcggccgggttgatcggcaacggcggcaacggaggggccggcggagccggcgccaacggcggcgcgggcggcaacggcggctggctctacggcagcggcggcaatggcggcgccggcggcgccggccccgccggagccatcggcgcgccgggcgtcgcgggtggtgccggcggggccgggggaacggccggattgttcggcaacggcggtgccggcggtgccggcggagcgggcggcgccggcggccgcggtggcgacggcgggtcggccggctggctgtccggcaacggcggcgacgccggcaccggcggcggcggcggcaacgccggcaacggcggcaacggcgggtcagccggctggctgtcgggcaacggcggcaccggcggaggcggcggcaccgccggcgccggcggccaaggcggcaacggcaacagcggtattgatcccggtaacggcggccagggcgcagacaccggcaacgccggcaacggcggccacggcggatcggccgccaagctgttcggcgacggcggcgccggcggcgccggtgggatgggcagcaccggcggcaccggcggtggcggcggcttcggcggcggcaccggcggcaacggtggcaacggccacgcgggcggtgccggcggtagcggcggcaccgccggcctgctcggcagcggaggcagcggcggcaccggcggcgacggcggcaacggcggtctgggcgccggcagcggcgccaaaggcaacggcggcaacggtggcgacggcggcaagggcggcgacgcccagttgatcggtaacggcggtaacggcggcaacggtggcaaaggcggcaccggcctgatgcccggaatcaacggcactggaggcgccggcggtagtcgcgggcagatctccggcaaccccggcacgcccgggcaataa

SEQ ID NO: 157 - DNA, 267 bp, Mycobacterium Tuberculosis
gtgaaccagattctgctcagcgtgattgctgagggcgggcccggtaacaccggacccgatttcgggaaggctagcccggtggggttgctggtgatcgtgctattggtgatcgccacgttgtttctggtgcgttcgatgaaccagcaactgaagaaagttcccaagtcgttcgaccgggatcaccccgagctcgaccaggcagccgacgagggcaccgaccgcgacggaccggcccgaccaccgggacccccgcatgagtccggctaa

SEQ ID NO: 158 - DNA, 882 bp, Mycobacterium Tuberculosis
atgacggttcctcccgctggcccctacggcaactacccctacggcccgaatacgtatgggcaggacccgtattggggaggccaaccgcagggcggctcctatccgccggcctacccaccccagcagtatccgcccggctggccggcggggccctatccgccaggaccacctccgcccgggccaggatcgaagacaccgtggctgatcctcgccggcctcgcggtgctgggtgtcatcctactggtggtgatcctggtgatcggcctccgcggcgacaacaagtcgaccacggcaacctctccggcgacgagtgctcccacgtcgcaaccgttttcccagcaaaccgcaaccggttgtaccccaaatgtgtccggcggtgtgcagcccatcggcgattcgatcagtgcgggtaagctgtcgttcccgaccagcgcggcacccgggtggtcggcgttctccgacgaccagaacccgaacctcatcgacgcggtgggcgtcggccacgaggtggccggtgccgaccagtggatgatgcaagccgaggttgcgataaccaacttcgtcaccaccatggacgtcgccgcgcaagcatcgaagttgatgcaatgcgtggccgacggccccggctacgcaggctcgtcgcccaccctgggcccgaccaagacgtcgtcgatcaccgtcgacggggtcagggccgcccgggtagacgccgatatcacaatcgccgacagttcacgcaacgtcaaaggtgattcggtcacgatcatcgcggtcgacaccaagccggtcaccgtcttcctgggcgccacccccatcggtgatgcaacctcgcgcgccaccgtcgagagggtcattgaggcgctgaaggtcaacaagtcctga

SEQ ID NO: 159 - DNA, 702 bp, Mycobacterium Tuberculosis
atggttggtgattgtcccagaagccgaaccgtgcgctggagctgggatactggccatgtgaccgccgagccgcagccgacccctaggccggctaaaccgcggttgctgcaggacggccgcgacatgttctggtcgctcgcgccgctggtcgtggggtgcatcctgttggcgggcctggttgggatgtgctcgtttcaactgggcgggaccaagcggggaccgatcccgtcctacgatgcggcccaggcgctgcgggcagacgccaagacgctgggattcccgatacggttgccgcaattgccaggcggctggacgcccaactccgggggtcgcggcggcatcgagaacgggcgagcggacccggcaaccggtcaacgccgcaacgcggcgacctcaatcgtgggattcatcagcccgaccgggagatatctgagcttgacccagagcaacgccgacgaggacaagctggtcggctccatccacccgtcgatgtacccgacggggacggtcgacgtgggcggcacccgttgggtcgtttacgagggttcggacgaaaacggtgccgtcgagccggtatggacgacacggctcaccggaccgggcggggccacccagctggcaatcaccggtgccggcagcatcgatcagttccgcacgctggcgtcggcgacgcaatcgcagcccccgttgcccgcacgatag

SEQ ID NO: 160 - DNA, 198 bp, Mycobacterium Tuberculosis
atgaggacgacggtgaccgttgacgacgccttgttagccaaagcggccgaattgactggggtgaaagagaagtcgacgctcctgcgcgaggggttgcagacactggtccgggtggagagcgcccggcggttggcggctctcggcggcaccgacccgcaagctaccgcggcgccgagacgccggacgtcgccccggtga

SEQ ID NO: 161 - DNA, 606 bp, Mycobacterium Tuberculosis
atgagcgagttgacggtactgcaggccgtgcggctcaagggccgggtgatcaccaccgacctggcgcagaccttgggtgaagaccttgccgacgtcgccgcgaccgtcgacaggctgaccgcggccggcctcctggtcgacgccacgccgttgcggatcagtcccagcggccggatgaggctcgacgacttgcttgccgaggagcgcaaccgggccgattcgaccgtgctggctgccgcttaccgcgatttccgttccgtcaacgccgatttcaagaggctggtcaccgactggcagctcaagggcgaaaagcctaacacacacgacgacgccgaatacgacgccgcggtgctgtcccgcctcgatggcgtacaccggcgggtgggcccgatcatcggtacggtggccatgcagctgccgcggttgagcaggtacccggtgaaattgcgtgcggcgctggacaaggtcaaagcgggcgacatcgcctggctgacgcgcccactcatcgactcctaccacaccgtgtggttcgaactacacgaggagctgatccaggccgtcgggctgacacgagacgaagcggctaaatccggtgatgcccagtag

SEQ ID NO: 162 - DNA, 1356 bp, Mycobacterium Tuberculosis
atgtgttccactcgggaggagatcacggaggccttcgcgtcattggctaccgcgctgtcccgcgtgctggggctgacctttgacgcattgaccaccccggagcgcctggcgctgctggagcactgcgagaccgcgcgacgccagctgcccagcgtcgaacacacgttgatcaatcagatcggcgaacaatccaccgaggaggagctgggcggcaagctgggattgacgctggccgaccggttgcgcatcacccgcagcgaggccaagcggcgagtggccgaggccgccgaccttggccagcgccgtgcgctgaccggcgagccgctgccaccgctactcaccgccaccgcaaaggcacagcgccacgggttaattggtgacggccatgttgaagtaatccgtgctttcgtgcaccgcctaccatcctgggtagacctcaagaccctggagaaggccgaacgggacttggctaagcaggccacccagtaccgtcccgaccagctggccaaattggccgcgcggatcatggactgcctcaaccccgatggcgactacaccgacgaggaccgcgcccgccgccgcggcttgacgttaggaaagcaagatgtcgatgggatgtcgcggctcagcggatatgtgacccccgagctgcgcgccactatcgaggcggtgtgggccaagctggccgccccgggtatgtgcaaccccgagcagaaggcaccgtgtgtgaacggcgcgccctcgaaggagcaggcgcggcgagacacccgcagctgcccacagcggaaccacgacgcgctcaacgccgaattacgtagtttgttgacaagtggcaatctgggccagcacaacggattaccggccagcatcatcgtgaccaccacgctgaaggacttggaggccgcggccggcgcgggcctcaccggcgggggtacgatcttgcccatatcggatgtgatccggctggcccgccacgcaaaccactacctcgcgatattcgatcgaggcaaggccctggcgctctaccacaccaagcgcctggcctccccggcgcagcgaattatgttgtacgccaaggacagtggctgcagcgcacctggttgcgacgtgcccggctattactgtgaagtccatcatgtcacgccgtacgcccagtgccgcaacaccgacgtcaatgacctgacactcggctgcggtggccatcatccgttagccgaacgtggctggacgacccgcaagaacgcccacggcgacaccgagtggctaccgccgccacatctcgaccacggccaacctcgagtcaatacgttccatcacccggaaaagctcctggcagacgacgaaggcgacccgtag

SEQ ID NO: 163 - DNA, 1017 bp, Mycobacterium Tuberculosis
atgaccagctacgacaccgacctgttggtcgtcggcggcggccccggcggactcgccacggcattgcacgcacgcgcgcgtggactttcggtgatcgtggccgagcctcgcgagaatcccatcgacaaggcgtgcggcgaggggctgatgcccggtggcctggccgaattgacctcgctaggcgtggacccggtcggtctgccctttcatgggattgcctacgttggtgaacatcgtcgggtgcaggcgcggtttcgcaccgggccggggcggggcgtgcgacgcaccacgctgcatgcggcactggcggcacgagccaaagagcaagacactgaatggatccggtcgcgggtagccactattcagcaagacgcacatggtgtgaccgccgccggcgttcgcgcgaaatggttggtggcagccgatggactgcattcggccgtccggcgcgccgtcgggatcaaagccaccgccgggacaccacggcgatacggggtgcgctggcattaccggctgccggtgtggtcggacttcgtcgaagtgcattggtcccgttggggtgaggcttatgtgactccggtggaaccggatctggtcggcgtcgcgatcttgtcccgccaacgacccgaacttgcctggtttcccagccttgcacaccatctgcaagacgcgagccgcggacacgcacgtggctgcggtcccttgcgccaggtggtctcccggcgcgtcgcggggcgggtgcttttggtcggtgacgcggccgggtacgaagatgccctaaccggcgaaggcatcagccttgccgtcaagcaggccgccgcggcggtgagcgccatcgtcgacgacacaccggcgtcgtatgaggccgcgtggcaccggatcactcgtgattaccggctagtcacccgcgggttggtgctggccagtacgccacgcgcggcacgccgtgccatcgtgccgctgtgcgcacttctgcccacggcattccggtacggggtgaacatcctggcgtactga

SEQ ID NO: 164 - DNA, 714 bp, Mycobacterium Tuberculosis
atgcgagtggcggtgctcagcggcgcggggatctccgcggaaagcggtgtaccgacgttccgcgatgacaagaacggattgtgggcccgattcgacccttacgagctgtccagcacgcaaggctggctgcgcaaccccgagcgggtctggggatggtacctatggcgccattatctggtggccaacgtcgaacccaacgacgggcatcgcgcgatcgccgcctggcaggaccatgctgaggtcagcgtcatcacccagaatgtcgacgatctgcacgagcgcgccggcagcggtgcggtgcatcacctgcacggcagccttttcgaatttcgttgtgcacgttgtggtgtgccctacaccgacgcccttccggagatgcccgagcctgcgatcgaagtggagccgccggtctgcgactgcggcggtctgatccggcccgacatcgtatggttcggtgagccgctgccagaggagccgtggcggagcgcggtcgaggcgacagggagcgccgacgtgatggtcgtggtggggacctcggcgatcgtctacccggcggccggtttacccgacctggcgctggcgcgcggcactgccgtgatcgaagtcaatcccgagcccacgccgttgtccggcagcgcgacgatcagcatccgcgagtcggccagccaagcgttgccggggctgttggagcgcctgcccgccctgctgaaatag

SEQ ID NO: 165 - DNA, 1296 bp, Mycobacterium Tuberculosis
atgtgccgcaccctgatcgacggcccggtgcgctcggcgatcgctaaagtcaggcagatagacaccacctcatccaccccggcggccgccaggcgcgtgacctcaccaccggcccgggagacacgcgccgccgtgctgctactggtcctcagcgtcggtgcgcgactcgcctggacctatctggcgcccaacggcgcaaacttcgtcgacctgcacgtttacgtgagcggtgcagcgtccctcgaccatcccggcaccctgtatggctacgtctacgctgatcagaccccggacttcccgctgccgttcacctatccgccgtttgcggctgtggtcttctacccgttgcatttggtgccgttcggtctgatcgcgctgctgtggcaagtagtgacgatggccgcgctctacggcgcggttcggatcagccagcgcctgatggggggcaccgctgagaccggtcatttcgccgcgatgttatggacggcgatcgccatctggatcgagccgttgcgcagcacctttgactatgggcagatcaacgtgctgctgatgctggcggcgctttgggcggtctacaccccgcggtggtggctatcgggactgctggtcggggtggcctcgggtgtcaagttgacgccggcgattaccgctgtctacctcgtcggcgttcggcggttgcatgcggccgcattttcggtggtcgtgttccttgccaccgtcggcgtgtcgctactggtcgtcggcgatgaagcccgctactacttcaccgacctgttgggcgacgcaggccgggttgggcccatcgccacctccttcaatcaatcctggcgcggcgcgatttcccggattctcggtcacgacgccggttttggtccgctggttctggctgcgatcgccagtacggcggtattggccatcctggcctggcgtgcgctcgacaggtccgatcggctgggcaaactattggtggtcgagttgttcggcctgctgctctcgccgatctcctggactcaccactgggtgtggctagtgccgctgatgatctggctgattgacgggccagcgcgtgagcgcccgggcgcccggattttgggctggggctggttggtgttgaccatcgtcggcgtgccgtggttgctgagctttgctcaaccgagcatctggcaaatcggccggccgtggtatttggcctgggccggtctggtctacgtggtggcgacgctggcgaccttgggctggatcgccgcctccgagcgttacgtgcgcattcggccgcggcgcatggccaattag

SEQ ID NO: 166 - DNA, 1677 bp, Mycobacterium Tuberculosis
atgaaggtcatggcgcagatggcgatggtgatgaacctcgacaaatgcattggttgccatacctgctcggtgacctgcaagcaggcctggaccaatcgctcgggaaccgagtacgtgtggttcaacaatgtcgaaacccgtccgggtgtgggctacccgcgcacctacgaggatcaggagcggtggcgcggggggtgggtgcgcgacaagaagggccggctgcggctgcgcgacggcggccggatccataagctgttgcgcatctttgccaaccccaagctgcccactatcggcgactactacgagccgtggacctatgactacgaaaacctgacatcggcgccggcgggtgacacctttccgaccgcggcgccgcgaagcctgatcagcggcaatccgatgaaggtgtcgtggggatccaactgggacgacaacctggccgggtcgccagagatcgtgccgaacgacccggtgctaaagaaggtcaaccaagtcaaccaagaggtcaagctgaagcttgaagagaccttcatgttttacctgccgcggatctgcgagcactgcctgaacccgtcgtgtgtggcgtcgtgtccgtcgggggcgatgtacaagcgcaccgaggacggcatcgtgctcgtcgaccaggaccgctgccgcggctggcggatgtgtgtgtccgggtgcccatacaagaaggtgtatttcaaccacaagaccggcaaggccgaaaagtgcaccctgtgctatccgcgcatcgaggtggggttgccgacggtgtgctcggaaacgtgtgtggggcggctgcgctatctgggtctggtgctctatgacgtcgatcaggtgctgcaggccgcgtcggtggaaagcgacaccgacctctacgaggcgcagcgccggatcctgctggacccgcacgatccgcgggtgatcgccggggcgcgcgcggaaggcatcgccgacgagtggatcgaggccgcccagcggtccccggtgtacgcgttgatcaacacctaccgggtggcgctgccgctacatccagagtaccggaccatgccgatggtctggtacatcccgccgctgtcgccggtggtcgacgcggtcagccgcgacgggcacgacggggaggacctgggcaatttgttcggcgcgctggacgcactgcggattccgattgcctatctggccgagctgttcaccgcgggcgacaccgaggtggtcgcgggcgtgttgcggcggctggcggcgatgcgctgctacatgcgcgacatcaacctgggccgggagacccagccccacatcccggaatcggtcgggatgaccgaggagcagatctaccagatgtaccgactgttggctgtggcgaaatatgaagagcgctatgtcattccgacgtcgtacgcgggggagctgccggccgcggcgatgaccgacgatatggggtgctcgttgtcggtcgacggcggaccgggaatgtacgagtccggtccgttcgggcagggcagccctactccggtgccaatcgccgtggagagcttccacgctctgcagcatgccggtagcgcggccaccggcggcgctggccgatcccgggtcaacctgctcaactgggaccccaacggcgcagcggcggggctcttcccggagcctcagcccagcaaggatgtggtccagcgatga

SEQ ID NO: 167 - DNA, 2571 bp, Mycobacterium Tuberculosis
gtgccgcagcctgtaggtcggaagtccaccgctctgccgagtcccgttgtaccgccccaggcaaatgcctcagcgttgcggcgggtactgcgacgggcccgagatggtgtcacgctgaacgtggatgaggcggccatagcgatgaccgcacgcggtgacgagctggccgacctgtgcgcgagcgccgcgcgggtgcgcgatgcgggtctcgtgtcggccggccggcacgggcccagcggcaggttggcgatcagctattcgcgcaaggtgtttatcccggtcacccggttatgccgggacaattgccactattgcacgttcgtcaccgtgccgggcaagctacgcgcccaaggttccagcacgtatatggaacccgacgagatcctcgacgttgcccgccgaggtgccgaattcggttgcaaggaagcgctattcactctcggtgaccgtccggaggcgcgttggcgccaggcacgcgaatggctcggcgaacggggctatgactccacgttgtcctacgtgcgcgcgatggcaatccgtgtgctggagcaaaccgggctgttgccgcacctgaacccgggtgtgatgagctggtcggagatgtcgcggctcaaaccggtggcgccgtcgatgggcatgatgctggagacgacctcgcgacggctgttcgaaaccaaggggctcgcccactacggcagccctgacaaagacccggcggtgcggctgcgtgtcctgaccgacgccggccggttgtccattccgtttaccaccggtctgttggtcggcatcggcgagacgctatccgagcgcgccgatacgttacatgcgattcgcaagtcgcacaaggagttcgggcatatccaagaagtgatcgtgcagaacttccgcgccaaggaacacaccgcgatggccgccttccccgatgccggaatcgaggattacctggcgacggttgcggtggcgcggctggtgctgggcccgggcatgcgcatccaggcgccgccgaacctggtgtctggcgacgaatgccgggcgctggttggcgccggggtcgacgactggggcggtgtctcaccgttgacgcccgaccatgtcaaccccgaacggccctggcccgctttggacgagctggcggcggtcaccgccgaagccggctacgacatggtgcagcggctgaccgcgcaacccaaatacgtacaggcgggcgcggcgtggatcgacccgcgggtgcggggacatgtggtggcgctggcggatccggcgaccggcctggcccgcgacgtcaacccggtgggcatgccgtggcaggagcccgacgacgtggcgtcctggggccgggtcgatctgggcgcagcgatcgacactcagggccgcaataccgcagtgcgcagcgacctggccagcgccttcggtgactgggaatcgatccgcgagcaggtgcacgagctggcggtccgcgctccggaacgcattgacaccgatgtgcttgccgccctgcgatcggcggagcgtgcgcccgccggctgcaccgacggcgagtatctggcgcttgccaccgccgacggtcctgcgctggaagccgttgccgcactggctgattcgttgcgccgcgatgtcgtcggcgacgaggtgacctttgtggtcaaccgtaacatcaacttcaccaacatctgctacaccggttgccggttctgcgcgttcgcccagcgaaagggtgacgccgacgcctactcgctgtcggtcggagaggtcgccgaccgggcatgggaggcccacgtcgccggggccaccgaagtatgcatgcagggcggtatcgatcccgagctaccggtcaccggctacgccgatctggttcgtgccgtcaaggcgcgggtgccctccatgcatgtgcacgcgttttccccgatggagatcgccaacggcgtcaccaagagcgggctgagcattcgcgagtggctgatcggcctgcgcgaggccgggctggataccatcccgggtaccgccgcggaaatcctggacgacgaggttcgctgggtgctgaccaagggcaagctgccgacgtcattgtggatcgaaatcgtgacgaccgcccacgaggtgggtctgcggtcatcatcgacgatgatgtacgggcatgtggacagtccacggcactgggtcgcccatcttaacgtgctgcgcgatattcaggaccgtaccggcggcttcaccgagttcgtcccgttgccgttcgtgcaccagaattcaccgttgtacctggccggtgcggcgcgccccgggcccagccatcgcgacaaccgcgcggtacatgctttggcgcggatcatgttgcacggccgcatctcgcacattcagaccagctgggtgaaacttggagtgcggcgcacccaggtgatgctcgaaggtggcgccaacgacctgggcggcacgctgatggaggagaccatctcgcggatggccggttccgaacacggatcggccaagaccgtcgctgagctggtcgcgatcgccgaaggcatcggccgcccggcgcgccagcgcactaccacatacgccctgcttgcggcctag

SEQ ID NO: 168 - DNA, 333 bp, Mycobacterium Tuberculosis
atgaggctgtcgttgaccgcattgagcgccggtgtaggcgccgtggcaatgtcgttgaccgtcggggccggggtcgcctccgcagatcccgtggacgcggtcattaacaccacctgcaattacgggcaggtagtagctgcgctcaacgcgacggatccgggggctgccgcacagttcaacgcctcaccggtggcgcagtcctatttgcgcaatttcctcgccgcaccgccacctcagcgcgctgccatggccgcgcaattgcaagctgtgccgggggcggcacagtacatcggccttgtcgagtcggttgccggctcctgcaacaactattaa

SEQ ID NO: 169 - DNA, 2025 bp, Mycobacterium Tuberculosis
atgacaaatccatacccaaatctgctgtccccgttggaccttgggtttaccacgctgcgcaaccgggtggttatgggttcgatgcacaccggactggaagaccgggcccgccatatcgatcggctcgccgactacttcgccgaacgtgcacgcggcggcgtcgggctgatcatcaccggtggctacgcgcccaaccgcaccggatggctgctgccgttcgcctccgaactcgtcacttcggcgcaagcccgacggcaccgccgaatcaccagggcggtccacgattcgggtgcaaagatcctgctgcaaatcctgcacgccggacgctacgcctaccacccacttgcggtcagcgcctcgccgatcaaggcgccgatcaccccgtttcgtccgcgagcactatcggctcgcggggtcgaagcgaccatcgcggatttcgcccgctgcgcgcagttggcccgcgatgccggctacgacggcgtcgaaatcatgggcagcgaagggtatctgctcaatcagttcctggcgccgcgcaccaacaagcgcaccgactcgtggggcggcacaccggccaaccgtcgccggttcccggtcgagatcatccgacgcagccgcgccgccgtcggatgcgacttcatcatctgttaccggctgtcaatggccgactacgttgcagaaggccagagttgggatgaaatcgtcgcgctggcaaccgaagtggaaggggcaggcgcaaccatcatcaactccggcttcggctggcacgaggcccgggtgcccactatcgtcacctcagtgccgggcggcgcgtttgtcgacatcagcagcgccgtcgccgaacacgtcactatcccggtggtggcgtccaaccggatcaacatgccgcaggccgcggaacggattctggccgaaacccaggtgcggctgatatcaatggcccggccgatgctgagcgacccggactgggtgctcaaggcgcagtccaatcgggtcgacgaaatcaacacctgcatctcctgcaatcaagcctgcctggaccacgcatttgccaggaaaacggtgtcgtgtctgctcaatccacgcgccgggcgcgagacgcagttggtgctgtccccgacccggcgcgcccgctcggtggccgtcgtcggggctggaccagccgggctggccacggcggccaacgccgcgcaacggggtcaccgggtcacgctgttcgaggccaacgactttatcggtggacagtttgacatggcccgccgcattcccggcaaagaggaattcagcgaaaccatccggtatttctcgacgattctggccaaacacggtgtcgaggtgcgactgggcactcgggtggccgcccaggagttgaccggctacgacgaggtcgtcttggccaccggcgtggcaccgcgcattccggccatccccggcatcgaccaccccatggtgttaacctacgccgaagccatcaccggtgtcagaccggtcgggcgaaccgtggctgtcgtcggcgccggcggcattggcttcgacgtcaccgaactgctggtcaccgactcctcacccaccctcaacctcaaagagtggaaggccgaatggggggtcgctgatccgcgagaagcccgcggagcgttgacgactccactgccggcgccgcccgcccgtgaggtgtacctactgcagcgcaccaaaggcccgcagggcaagcggctcggcaagaccaccggatgggtccaccgggcgtcgttgaaggccaagggcgttcatcagctgtctggggtgaactacgaacagatcaacgacgacggcctacacatcagcttcggcccgaagcgcaggcggccccagctgctggcggtggacaacgtagtggtctgcgccggccaggaaccggtgcgagatctggagagtgaactgcgccggcacggcattaacccgcacatcatcggtggcgcggcggttgccgctgagttggacgccaagcgcgccatcaagcaaggcaccgaacttgcggccaggctataa

SEQ ID NO: 170 - DNA, 1467 bp, Mycobacterium Tuberculosis
gtgcgcaccgcaaccgccacatcggtcgccgttatcggcatggcttgccggctcccgggcggcatcgattccccacaacgcctctgggaagcgctgttacgcggcgacgatttggtgggtgagattcccgctgaccggtgggacgcgaacgtgtactacgaccccgaacctggtgtccctggtcgatcggtatcgcgttggggcgcctttctggacgacgtcggcgggtttgactgcgatttcttcggcctgaccgagcgggaggcgaccgcgatcgacccacagcaccgcttgctgctggaagtgtcgtgggaggctatcgagcacgcgggtgtggacccggcgacgctcgctgaatcacaaacaggtgtcttcgtaggactgacacacggcgactacgagctgctgtccgcggattgcggcgccgcggaaggaccgtacggattcaccggcaccagtaacagtttcgcgtccgggcgagtggcctacacactcggactgcatggccccgcggtcacggtggacaccgcgtgctcgtccgggttgacggctgtgcatcaagcctgccgcagcctggatgacggtgaaagcgatctcgctcttgccggtggtgtggttgtcacgctagaaccgcggaagtccgtctcgggttccctgcaaggcatgttgtcgcctaccgggcgttgccatgccttcgacgaagcagctgatggcttcgtgtccggtgaggggtgcgtggtcctgctgctgaagcggctaccggatgcggtgcgcgacggtgatcgtgtgctggcgatcgttcgtggcaccgcagccaaccaggatggccgcaccgtgaatatcgcggcgccgtcggcgcaggctcagatcgcggtgtatcagcaagcgttggctgcagcgggcgtcgaagcgtcgacggtggggatggtcgaagcccacggcaccggcacccccgttggagatccggtcgaatacgcgagcctggccgcggtgtacggaaccgagggtccgtgcgcgctgacgtcggtgaaaacaaacttcggtcacctgcagtcggcatcggggcccctggggttgatgaagacaatcctggcgttgcggcatggggttgtgccgcagaacctgcacttctgccggctgcctgatcagctggctgagattgacactgaactctttgtgccgcaagcgaatacatcctggccggacaacaccggacagccacgtcgcgctgcggtttcctcgtatggaatgtcgggtaccaacgtgcatgccatcttggagcaagcgccggtatcagaaccagcggcttcgggacctgagctcactcccgaagccggtgggctggcgttgtttccggtgtcggctacctcggctgagcaactacacgtcacggccgcccggctggcggattgggtcgaccagaacggcaacgcgggcagtcgagttagcatgcgggacctgggctaa

SEQ ID NO: 171 - DNA, 4749 bp, Mycobacterium Tuberculosis
gtgacggcgagcagttttgacgagctgagcgcggcgctgcgggacgtcgctggcgatcagattccctatcagcccgcagtggggcacgacgaccgcgggccggtgtgggtgttctccgggcaaggctctcagtggcccgggatgggcactgaactgctggtagccgaaccggtgttcgccgccaccgtcgcggcgatggagccggtgatcgctagggagtcagggttttcggtgaccgaagcgatgtcggcgccacagacggtcagcggtattgaccgggtgcagcccaccatcttcgcggtgcaggtcgccctggccgcggccctgaagtcgtatggggtacgtcctggtgccatcatcgggcactcgctcggcgaggctgcggcagccgtggtcgccggagcactgtcgctgcacgacggattgcgagtcatctgccggcgctcgcggctgatgtcgcgcatcgccggtagtggcgcgatggcatcggtggaactgcccggccaacaagtgttgtcagaacttgcgattcgtgggatctccgacgtcgtgctctcggtggttgcctctccgacctcaaccgtcgtcggcggcgccacgcagtcgatacgtgacctggtggcggcctgggagcagcaggatgtgctggcgcgcgaggtagctgtggacgtcgcttcacatacaccgcaggtcgatcccatcctggacgagttgctcgaggtcctggccgaggtcgatccgacggcgccggaaattccgtattactccgcaacgttgtgggatccgcgcgagcgaccgtcgttcaccggcgagtactgggtggaaaacctgcggtacacggtgcgattcgcggcggcggtacaggccgcgctcaaggacgggtaccgagtgttcggcgagctggctccgcatccgctgctcacctacgcggtcgagcagaacgccgccagtctcgacatgccgatcgcaacgcttgccgcgatgcggcgcggggaacagctgccgttcgggttgcgcggcttcgtcgccgacgtgcacaacgccggcgccaaggtggacttctctgtccagtaccctgatgggcgcttggtggatgcgccattgccgagctggacgcaccgcaccctgatgctcagccgtgaggattcacaccgctcgcacaccggcgcggtccaggcggttcatccgctgcttggggcccatgtgcacctgttggaggaaccggagcgtcacgtctggcaggccggggttggcaccggggcgcatccgtggctcggtgaccatcggatacacaacgtggctgcgtttcccggtgcggcctactgtgagatggcattggccgcggcgcgcaccactcttggcgagctgtcggaggtgcgcgacatcaagttcgagcagacgctgttgctggacgagcagacggtggtctcatcggccgcgacgatcgccgcgcctgggatcctacagttcgcagtcgagagtcatcaggaaggcgagcccgcacggcgggccagcgcgatgctgcacgcattggaggagatgccgcagccgcccgggtacgacacgaacgctctgaccgccgcccatgagtccagcatgagcggtgaggaactgcgaaaaatgtttaacagcttaggtattcagtatggtccggctttttcaggcctagttgcggtgcacacggcgcgcggggacgtcaccacagtgctcgccgaggtcgcgctgcctggagccatccgatctcagcagtcggcatatgccagccacccggccctgcttgatgcgtgtttccagtcggtgcttgttcatcccgaggtccagaaggcgactgtcggtggtctgatgctgcccgtgggcgtgcgtaggctgcgcaactatcactcgacgcgcagcgcgcactactgcctcgcccgggtcacgtcatcgtcgcgagccggcgaatgcgaagccgatctcgacgtgttcgaccaggccggaacggtacttttgaccgtcgagggattacggctggccgcagggatttccgaacatgaacgcgcgaaccgggtgttcgacgagcgattgttgaccatcgagtgggagcggggtgagctgcctgaggtgccgcagatcgatgcgggatcctggctgctgctcagtgcgtccgaagctgatccgctgaccgcgcaactcgccgacgcgttgaatgccgttggtgcccagagcactagcgtggcttcggcgtcggatgtcgcacaattgcgttcgctgctcggaggcaggctcaccggtgttgtcgtggtgactggcccgccaacgggtggtttgacacagtgcggccgcgactatgtgtcacagctggtgggtattgcccgcgagctcgcggagctgcccggtgagccgccgcggctgttcgtggtgaccaggagcgcggcgagcgtgctgccgagcgatcttgccaacttggaacaggcgggattgcgtggactgatgcgggtgatcgattccgagcatccgcacctgggtgccaccgcaatcgacgtcgacaacgacgagaccgtcgctgccctggtggccagccaactacagagcgggtcgcaggaggacgaaaccgcttggcgcaatggcatttggtacaccgcccggctgcgtcccggtccgttacgcccggccgaacggcgaaccgccgtcgtcgaatacagacgcgacggtatgcgcctgcagatccgcactcccggcgacctcgagtcgttggagttcgtcacattcgaccgggtcgcgccgggaccgggcgagatcgaggtcgcggtgaccgcatcgagtgtcaacttcgccgacgttctggtcgctttcgggcggtatcccaccttcgagggctaccgacagcagttgggcatcgacttcgccggtgtggtgaccgcggtcgggccggatgtcaccgagcatcggatcggtgatcacgtcggcggcatgtccgccaatggctgctggagcacattcgtcagatgcgatgcccggctggcggtgacgctcccgcccgagctgccggtggccgccgccgccgcggtaccgaccgcctccgcgacggcttggtacgccctgcacgatctggctcgcatctgctcggacgacaaggtgctgattcactcggggaccggtggtgtcgggcaggcggcgatcgcgatcgcacgggccgccggatgcgagatcttcgccaccgcgggcagtgcccagcggcgacaactgctgcacgacatgggtgtcgagcatgtctacgactcacggagcaccgagttcgccgagcagatccgaggcgacaccgatgggtatggtgtcgacgtcgtactcaactcgctgcccggcgccgcacaacgtgctgggatcgaattgctggcctttggcgggcgattcgtggagatcggcaaacgtgacatctacggcgacactcggctcgggttgttcccgttccgccgcaacctgtcgctgtatgccgtcgacttggcgctgctgacacacagccacccgcacaccgtccggcgcctgctgaaaaccgtctaccaacacacggtcgagggcacgctgccggtgccgcagaccacgcactatcccattcacgacgctgccgttgccattcgtttggtcggcggagccgggcacaccggaaaagtggtgctcgatgtgccgcgtaccggtgaaggcgtggccgtggtgccccccgaacaggtccgcacgtcccggcccgacggcgcctatctcgtcaccggtggtttgggcggcctcggcctgttccttgccggcgagctggcggcggcgggctgcggacgcatcgtgctcaactcccgttcgacgcccagcccgcacgccaccagggtcatcgagcggctccgcgccgccggtgctgatatccaggtggaatgcggtgacatcgctgatgccgcaacggcccaccgagtggtggcggtggccaccgcctcgggcttgccggtgcgcggcgtgctgcacgcggcggcggtggtcgaggacgctacgttggccaatgtcaccgacgaacttatcgaccgctgttgggcgccgaaggtacacggcgcgtggaacattcatcgggccaccgccgcgcagccactggagtggttctgcttgttctcctcggccgcggccttggtgggctcgccgggtcaaggcgcatatgcggcggccaacagctggttggacgcttttgcccactggcggcgggcgcagggccttccggctacctcaatcgcctggggagcatgggccgagattggccgcgctaccgcgctggccgaaggcaccggcgcagcgatcgcgcccgccgagggtgctcgagccttccagacgctgcttcgctacggccgggcgtactccggctatgccccgatcatgggtaccccatggttgacggcctttgcgcaacgtagccgatttgccgaagcgttccacgccacgggccaaaatcaaccggccaccgggaaattcctcgccgaactgggcagcttgccccgcgaagagtggccccgcacagtcaggcggttggtatcggaccagatcagcctgctgctgcggcgaaccattgatccggaccggccgctgtccgactatggtttggattccttgggcaacttggagttgcggacccgcatcgaaaccgaaacgggtatacgcgtcagtcccacaaagatcaccacggttcgcggcttggccgagcacgtgtgcgacgagctggcagccgcccaatctgcgccggtctga

SEQ ID NO: 172 - DNA, 1617 bp, Mycobacterium Tuberculosis
atgcggatcgccggcgtggggctcggccagttgctcctggcgctggatgcgaccgtggtcagcctggtggacgccccgcgcggcctggacctgccggtggcgtcgacggcgctgatcgattccgacgacgtgcggctgggcctggcggccgcggcgggctcggccgatgtgttcttcctgatcggggtcaccgacgacgaggcggtgcgctgggtcgacgatcaggcacgccaacgggcgccggtggcgatcttcgtcaagcacccgtcggactcggtggtggccggggccgtccgcgccggctcggcggtggtagccgtggagccgcgggcccgctgggaacggctgtaccacttggtgaatcatgtcttggagcatcatggtgaccgggccgaccccaccgacgattccggaaccgacctgttcgggttggcacagtccctggccgaccgcatccacggcatgatcagcatcgaggacgcccagtcgcacgtgctcgcctactcggcctccaacgacgaggccgacgagctgcgtcggctgtccatcctgggccgcgccggcccgcccgagcatctgcagtggataggtcaatggggcatcttcgatgccctgcggcccggccgtgaggtggtgcgggtggccgagcgccccgagctggggttgcgtcctcggctagccatcgggattcatcagccgggggtcggtgcgctgcggccaccggtgttcgccggcacgatctgggtccagcaaggctcgcagccgttggccgacgatgccgaggagatgttgcggggtgctgcggtgctggccgcccggatcatgtcgcgactggcgacccagcccaatacgcacgcgctgcgggtacagcaactactgggcctggccgagctgaacgcaaccacagcacccgtcgacgtatcgaccatcgcccgtgaactcggcgtcgccgccgagggcaacgcaacgctgatcggtttcgacaccgcggaaaaccgcgataccgcagtccgccatgttcggcttgttgacgtcatggcattgagcgccagcgcttttcgccacgacgctcaggttgccgccaacggctcacggatctatgtgctgctgccccaaaccacgaccggccgagctgtcacctcgtgggtccgcggcacaatcagcgcactgcgcgccgagctgggagtagcactacgggcagccatcgcggggccggtcgcgggacttgccgaagtcaacccggcacgcgtcgaggtggatcgggtactcgagagtgccgagcgccacccgatcttggggcaggtgacatcgctggccgaggcacgcaccaccgttctgctcgacgaaatcgtcaccctggtcggcaccgaccagcggctcgtcgatcctcggatacgtgacctgggcgcccaggacccggtgctggctcagaccctgcgtgcctacctggatgccttcggcgacatcggcgccgccgcacggtcactgcaagtgcatcccaacaccgttcgctaccggataaggcggatcgagcagctgttgtcgacctcgctgggcgatccggatgtgcggctgctcttttcgctggggctgcgggccatggaacgcacggcttag

SEQ ID NO: 173 - DNA, 1422 bp, Mycobacterium Tuberculosis
gtgctgctggcctccctgaatcctgctgtcgtctccgccgccgatatcgcggacgcggtccgcatcgacggcgacgtgctgagccgtagcgacctggtcggcgcggcaacgtcggtggccgagcgggtcgccggtgcgcaccgggtcgccgtgctggccacgccgaccgcgtcgacggtgctggcgatcaccggctgcctgatcgccggcgtgccggttgtgccggtacccgccgatgtgggcgtcaccgaacgccggcacatgctcaccgactccggcgtccaggcatggctgggcccgttgcccgacgacccagcggggctgccacacatcccggtgcgcacgcacgcgcggtcctggcaccgttatccggagccctcacccggggccatcgccatggtggtctacacgtccggcaccaccgggccgcccaaaggcgtgcagctgagccggcgggcgatcgccgccgacctcgatgcattggcagaggcctggcagtggacggccgaggacgtgctggtccacggtctgccgctgtatcacgttcacggcctggtgctgggcttgctcgggtcgctgcggttcggaaatcgcttcgtgcacaccggtaaaccaacgccggccggctacgcccaggcctgttatgaagcgcacggcacgttgttttttggggtgccgacggtgtggtcacgagtggcggccgaccaagctgccgccggggcgctcaaaccggcgcggctgctggtgtccgggagtgcggcactacccgtgccggtgttcgacaagctggtgcagctcaccgggcaccggcccgtcgaacgctacggtgcttcggagtcgctgatcaccctatcgacgcgggctgacggtgagcgtcgcccgggctgggtcggcctgccgctggccggtgtgcagacccgactggtggacgacgatggcggtgaggtcccgcacgacggggaaaccgttggaaagcttcaggttcgcggtccgaccctgttcgacggctacctgaatcaacccgatgccaccgccgcggcgttcgacgccgacagctggtaccgcaccggcgacgtcgcggtggtcgacggcagtgggatgcaccgcatcgtgggacgcgagtcggtcgacttgatcaagtcgggtggataccgggtcggcgccggtgaaattgaaacggtgctgctcgggcatccggacgtggcggaggcggcagtcgtcggggtgcccgacgatgatctaggccagcggatcgttgcctacgtagtcggctcagcgaatgtcgatgcggacgggcttatcaactttgttgcccaacaactttcggtgcacaagcgcccgcgcgaggtgcgtatcgtagatgcgctgccgcgcaacgcgttggggaaagtgctcaagaagcagttgctgtcagaaggctga

SEQ ID NO: 174 - DNA, 1176 bp, Mycobacterium Tuberculosis
atggtggatttcggggcgttaccaccggagatcaactccgcgaggatgtacgccggcccgggttcggcctcgctggtggccgcggctcagatgtgggacagcgtggcgagtgacctgttttcggccgcgtcggcgtttcagtcggtggtctggggtctgacggtggggtcgtggataggttcgtcggcgggtctgatggtggcggcggcctcgccgtatgtggcgtggatgagcgtcaccgcggggcaggccgagctgaccgccgcccaggtccgggttgctgcggcggcctacgagacggcgtatgggctgacggtgcccccgccggtgatcgccgagaaccgtgctgaactgatgattctgatagcgaccaacctcttggggcaaaacaccccggcgatcgcggtcaacgaggccgaatacggcgagatgtgggcccaagacgccgccgcgatgtttggctacgccgcggcgacggcgacggcgacggcgacgttgctgccgttcgaggaggcgccggagatgaccagcgcgggtgggctcctcgagcaggccgccgcggtcgaggaggcctccgacaccgccgcggcgaaccagttgatgaacaatgtgccccaggcgctgcaacagctggcccagcccacgcagggcaccacgccttcttccaagctgggtggcctgtggaagacggtctcgccgcatcggtcgccgatcagcaacatggtgtcgatggccaacaaccacatgtcgatgaccaactcgggtgtgtcgatgaccaacaccttgagctcgatgttgaagggctttgctccggcggcggccgcccaggccgtgcaaaccgcggcgcaaaacggggtccgggcgatgagctcgctgggcagctcgctgggttcttcgggtctgggcggtggggtggccgccaacttgggtcgggcggcctcggtcggttcgttgtcggtgccgcaggcctgggccgcggccaaccaggcagtcaccccggcggcgcgggcgctgccgctgaccagcctgaccagcgccgcggaaagagggcccgggcagatgctgggcgggctgccggtggggcagatgggcgccagggccggtggtgggctcagtggtgtgctgcgtgttccgccgcgaccctatgtgatgccgcattctccggcggccggctag

SEQ ID NO: 175 - DNA, 369 bp, Mycobacterium Tuberculosis
gtggcgttggtgttggtgtacctggtggtgctggtcctggtggcgatcgtgctgttcgctgcggcgagcttgctattcggccgtggcgagcagttgccgcccctgccgcgggcgacgacggcgacgacgctgccggcgttcggggtcacccgcgccgacgtcgacgcggtcaagttcacgcaggtgctgcgcgggtacaagaccagcgaggtggactgggtgctggaacggctcggccgtgagctcgaggcgctacgctctcagctcggggcgatccacgcctcgtcggaagacgccgaggccgagtctgacgcgtcaaacccttcgcgcggcgagaccgtcgtgcactaccgttctgaccccgcgtga

SEQ ID NO: 176 - DNA, 396 bp, Mycobacterium Tuberculosis
gtgttcgccaacatcggttggtgggaaatgctcgtcctcgtcatggtcgggctggtggtgcttggcccggagcggctcccgggtgccatccgctgggcggcaagcgctctgcggcaggcgcgcgactatctcagcggtgtgaccagccagctacgtgaggacattggacccgaattcgatgatctgcggggacatctcggtgagctgcagaagctacggggaatgactccgcgggctgcgttgaccaagcacctactggatggcgatgattccctgttcaccggagacttcgaccgaccgacgccgaagaaaccggatgcggcgggctcggcggggccggacgctactgagcagatcggtgcggggcccatcccgtttgacagcgatgccacctag

SEQ ID NO: 177 - DNA, 558 bp, Mycobacterium Tuberculosis
atgagtcgacagtggcactggctggcagcgacgctgctcctgatcaccaccgccgcgtgcagtcgtccgggcaccgaggaaccggattgcccgacgaaaataaccttgccgcccggtgctacgcccaccacgaccctcgacccgagatgcatagtgcgcgcgaccaccaccggcacagccgacggcgatgcggcgtcgcgctggaccggaaccgtgcggatcgccgggttctatgcctcgatctgcaacgcggtatgggacgggaacgtcagccttgcgggaaaggacgagctgaccggcaaggctacgcttatcctcgtcgaaaccagttgcccgggcaaggttgtcgccggcgaactcgtgctgaaggggaacgtcggttcggacagcctcgcgatcacctgggcgcaccccgaactcccgcagcgggcgttcgacctcggcgccggacagggcacgatccgccgatcgggcgaccgtgccgagggaacgttcaactcggatatgggtgggggcaccgagttcttcttgacgtggtcgctgacgatgcgtaactga

SEQ ID NO: 178 - DNA, 1308 bp, Mycobacterium Tuberculosis
atgggatcggtcaacagggtgtacctggcgcggctctcgcggatgtcggtgctgggaccgctcggcgaatccttcgggcgcgttcgcgatgtcgtgatcagcatcagcattgtccgccaacaaccgcgagtgctcgggctggtggtcgatttggcgacccgccgcaagatattcataccgattctgcgggtcgccgcgatcgagccgcacgcggtgacactgagcaccggcaacgtgtcactgcaccgcttcgagcagcggccaggcgaggctctggcgctgggtcaagtgctcgacaccctggtgaaggtcaacgatcccgcactacccgagctggccggcgtcgacgtcgtggtcaccgacctgggtgtcgagcaaacccgaagtcgcgactggatggtgactagggtcgccgtccgcacccaacgtcggctccgacggcgctgcccagtgcacgtcgtggactggcacaacgtggcggggttgacgccgtcggccttggcgatgccgggtcaagacgtggcacagctgctcgaccagttcgagggatggaaagcggtcgacgtggccgacgccatccgcgggctgccgccgaagcgccgccacgaggtgttcaaggcgctccacgacaagcgcttggccgacgtcctgcaggagctgcccgaactggatcaggccgaggtgttgtcgcaactgggcaccgaacgcgcggccgacgtgctggaggagatggatcccgacgacgccgccgatctgctcgcggtcctgaatccgaccgaagccgagttgctgctgacacgaatggatcccggcgactccgggcaggtgcgaaggctgctgacgcactcccccgacacggcgggcggattgatgacttccgatccggtggtgttgaccccggacacctcgattgcggaggcgttggcgcgggtccgcgatcccgatctcacccccgccctggcgtcaatggtgttcgtcgcgcgcccgcccacggccacgcccactgggcactacctgggttgtgtgcatttgcagcggctgcttcgtgacccgccggccgagctggtcggcggagttgtggacactgacctgctcacgctcactccggagaccccgctggccgcggtgactcgctacttcgccgcctacaacctggtgtgcggaccggtggttgacgacgagaaccacctgctgggagcggtgaccgtggacgacctgctcgaccatctattgccgcatgactggcgtgtagatatgccggagctcgacccctccggagcaccggacagacccggaggaccacggtga

SEQ ID NO: 179 - DNA, 1101 bp, Mycobacterium Tuberculosis
gtgttcccagggtttgacgcattgcccgaagtgctgcgaccggtcgcgcgaccccagccgccgaacgcacaccccgttgcccagccaccggcccaagccttggtcgactgcggtgtctacgtctgcggccagcgactgcccggcaagtacacctacgccgccgcgctgcgcgaggtgcgcgagatcgaactgaccgggcaggaggcgttcgtctggatcgggctgcacgagcccgatgaaaaccagatgcaggacgtagcagacgttttcgggttgcacccgttagccgttgaggacgccgtgcacgcgcaccagcgacccaagttggagcgctacgacgagacgctgttcctcgtcctcaagaccgtcaactacgtcccgcacgaatcggtggtactggcccgcgagatcgtcaaaaccggcgagatcatgatcttcgtcggcaaggatttcgtggtcaccgtccgccacggcgaacacggcgggttatccgaggtgcgtaagcggatggatgccgaccccgaacatttgcggttgggaccgtatgcggtgatgcacgcgatcgccgactacgtggtcgaccactacctcgaggtgaccaatctcatggagaccgatatcgacagcatcgaggaagtagcgttcgcgccgggccgcaagctcgacatcgaaccgatctatctgctcaagcgggaagtggtcgagttgcgccggtgcgtgaatccgctatcgaccgcattccagcgcatgcagaccgagagcaaagacctcatttcgaaagaagtgcggcgctacctgcgcgacgtcgccgaccaccagaccgaggccgccgaccagatcgccagctacgacgacatgctcaactcgctggtgcaggccgcgctcgcccgggtcggcatgcagcaaaacatggacatgcgcaagatatccgcgtgggcaggtatcatcgcggtccccaccatgatcgcgggcatctatggcatgaactttcacttcatgcccgagctggactccaggtggggttacccgacagtgatcggcgggatggtccttatctgtctgttcctctaccacgtcttccgcaacagaaactggctctag

SEQ ID NO: 180 - DNA, 432 bp, Mycobacterium Tuberculosis
gtgatcatccctgacatcaatctgctgctctacgcggtcatcaccggattcccgcagcaccggcgcgcgcatgcgtggtggcaagacaccgtcaacggccacacccgtatcgggctgacgtatccggcgttgttcgggttcctacggatcgccaccagtgcccgcgtgctcgccgcgccactgccaaccgcggatgcgatcgcctatgtgcgcgagtggctttcgcagccgaacgtggacctactcacggcgggtccgcgccacctggacatcgcgttgggcctgctcgacaagctcggcacagccagccacctaaccaccgatgtgcaactggccgcctacggcatcgaatacgacgccgagatccattccagtgacaccgactttgcccgattcgccgatctgaagtggaccgacccgttgcgcgaataa

SEQ ID NO: 181 - DNA, 1740 bp, Mycobacterium Tuberculosis
atgactacggcgatacgccgggcggccgggagcagctacttccgaaacccctggcctgcgctgtgggcgatgatggttggcttcttcatgatcatgctcgactccaccgtcgtagccatcgcgaatccgaccatcatggcccagctacgcatcggttacgccaccgtggtttgggtgaccagcgcctatctgctggcctacgcggtgccaatgctggtggccggccggcttggcgaccggttcggcccgaagaatctctacctgattggcctgggggtattcaccgttgcgtcgctggggtgcggtctgtcgagcggtgccggcatgctgattgccgctcgagtggtgcaaggcgtcggcgccggattgcttaccccgcagacgctgtcgacgataacgcggatcttcccggctcatcgccgcggtgtcgcgctgggcgcatggggcaccgtcgccagtgtcgccagcctggtgggaccgttggccggcggcgcgctggtcgacagcatggggtgggagtggattttcttcgtcaacgttcccgtcggcgtcatcggcctgatcctggcggcctatctgattccggcactaccccaccacccgcatcggttcgattggttcggcgtcggattgtctggtgcgggaatgtttctgattgtcttcggactacagcagggccagtccgccaattggcagccttggatttgggcggtgatcgtcggcggtatcgggtttatgtcgctgttcgtttactggcaggcgcggaacgcccgcgagccgctgatcccactggaggtcttcaacgaccggaacttcagcttgtccaacctcaggatagcgatcatcgccttcgcggggacggggatgatgctgccggtgacgttttatgcgcaggcggtgtgtgggttgtcgccgacccacacggccgtgctgttcgcgccgacggcgatcgtcggtggcgtgctggccccgttcgtcggcatgatcattgacaggtcccatccgttgtgcgtactgggtttcggcttctcggtgctggcgatcgcaatgacatggctcttatgcgagatggctccgggcacgcccatctggcggctggtgttgccgttcatcgcgttaggcgttgctggggcgttcgtgtggtcgccgctgaccgtcaccgcgacccgcaatctacggccgcacctggccggtgcgagctcaggtgtgttcaacgccgtccggcagctgggggctgtgctggggagcgcgagcatggccgcgttcatgacgtcgcgcatcgccgccgagatgcccggtggtgtggacgcccttaccggtcccgccgggcaggacgctaccgtgttgcagctgcccgagttcgtgcgcgaacccttcgcggccgcgatgtcgcaatcgatgctgttgcccgccttcgtcgccctattcgggatcgttgccgcgttgttcctggttgacttcaccggtgctgcggttgccaaagagccgttgcccgaatccgatggcgacgctgacgacgacgactatgtcgagtacatccttcgtcgggaaccggaagaggattgcgacacccagccgctgcgggcgtcgcgcccggcagcggccgcagcgtcacgcagcggtgctgggggtccgctggcggtcagctggtcgacgtcagcccaaggaatgcccccaggtccaccaggccgtcgggcgtggcaggcagatactgagtcaacagctccgagcgcactataa

SEQ ID NO: 182 - DNA, 1692 bp, Mycobacterium Tuberculosis
atggccttcccggaatattcgcctgcggcgtccgctgcgacgtttgctgacctgcagattcatccccgcgtcttgcgggcgatcggcgacgtcggttacgagtcaccgacggctatccaggcggctacgatcccggcgttgatggcaggctccgacgtggtggggctggcgcagaccggcaccggcaagacggcggcatttgcgattccgatgctgtccaagatcgacatcaccagcaaggtgccccaggcgctggtgctggtgcccacccgggagctggctctgcaggtggccgaggcgttcggccgctacggtgcctatctgtcgcaactcaacgtgctgccgatctacggcggatcgtcgtatgccgtgcaactggccggattgagacgcggcgcgcaggtggtggttggcacccccggtcgtatgatagaccatctcgaacgggcgaccttggacctgtcgcgggtggactttctagtgctcgatgaggccgatgagatgctgaccatgggtttcgccgacgacgttgagcgcattctgtccgagacccccgaatacaagcaggtcgccctgttttccgcgaccatgccgccggcgatccgcaaactcagcgccaagtatctgcacgatccgttcgaagtcacttgtaaggcgaaaaccgctgtggccgagaatatttcgcagagctacattcaggtagcacggaagatggacgcgctcaccagagtgctcgaagtcgagccgttcgaggcgatgatcgtctttgtccgcaccaagcaggcgaccgaggagattgccgaaaagctgcgtgcccgagggttttccgcggctgccatcagcggtgacgtcccgcaggcgcagcgggagcggaccatcacggcgctgcgggacggcgacatcgatatcctggtcgccaccgatgtggcggcgcgcggactcgacgtggagcggatatcacacgtgcttaactacgacatcccgcacgacaccgagtcctacgtacaccggatcgggcgcaccggcagggccgggcgttcgggagccgcgctgatattcgtctcgccacgggagcttcacctgctcaaggcgatcgaaaaggctacgcggcaaacgcttaccgaggcgcaattgcccaccgtcgaggatgtcaacacccagcgggtggccaagttcgccgattccatcaccaatgcgctgggcggtccgggaatcgagctgttccgccgactggtcgaggagtatgaacgcgagcatgatgtcccgatggctgacatcgccgcggcactggccgtgcagtgccgcggcggtgaggcattcctgatggcacccgacccgccgctttcgcggcgcaaccgcgaccagcgtcgggaccgtccgcaaaggcccaagcgtagaccggacttgaccacctaccgcgtcgccgtcggcaagcggcacaagatcggtccaggcgccatcgtcggcgccatcgccaatgagggtgggctgcaccgcagcgacttcggtcagatccgtatcgggccagacttctcgctagtagaattgccggcgaagctgccccgcgcgacgctcaaaaagcttgcacagacccgtatctcgggtgtgctgatcgaccttcggccataccggccgcccgacgcggcgcgccggcataatggcggcaaaccacggcggaaacacgtcggatga

SEQ ID NO: 183 - DNA, 1152 bp, Mycobacterium Tuberculosis
atgaccctgcccaaggaaagagccgcccagggcggactcgagcggatcgcccacgtggaccgggtggcgtcgttgaccgggatccgtgctgttgccgcattgctggtcgtcggcactcatgcggcctacaccaccggcaagtacacccacggctattggggcctgatgtcgtcccgcatggagatcggcgttccgatctttttcgtgctgtcggggttcctgctattccggccatgggttaagtccgccgctaccggcggccccccgccgtcgttgagccgctatgcgtggcaccgggtccggcggatcatgcccgcctacaccgtcaccgttctgttggcctacctcgtctatcacttccgcacggcggggcccaaccccgggcacacctgggtcgggctgttccgcaacctcaccttgacgcagatctataccgacggctatctgggtgcgttcctgcatcagggtctgacccaaatgtggagcctcgcggtggaggttgccttctacctggcgttgccggcgttggcatacctactgttggtgctcgtctgccggcggcgatggcagcccaggttgctgttggccaccatggcggggctgacgatgatcagcccggcatggttgatcctggtgcacaacacgcactggatgcccgacggcgctcggctgtggctacccacctatctggcttggttcgtcggcggcatgatgctggccgtgctggcggcgatgggcgtgcgctgttatgcattcgtggccataccgttggcggtcatctgctacttcatcgtctccactccgatcgcgggcgcgcccacgacgtcgcccacagcgctggccgaggcgctggtcaagaccgccttctatgccgtgatcgccgtgctggcggtggcaccgctggccttgggtgaccaggggtggtatgcccagttgctggccagccggccgatggtgtttcttggtgagatctcctacgagatcttcctgatccatctggtgaccatggagatcgccatggtggacgtgctcgggtatcgggtttacaccagttcgatggtgaacctttgtctcgtgacgctggtgctgacgatcccattggcgtggttgttgcaccgtttcactcgggtccagggtgaccggccttcctag

SEQ ID NO: 184 - DNA, 609 bp, Mycobacterium Tuberculosis
atggcgggtaccgactggctgtccgcgcgtcggaccgagttagccgcagatcggatactcgacgccgccgagcgactctttacgcagcgtgacccggcgtcgatcggcatgaacgagatcgccaaggccgcaggctgttcgcgcgcaacactgtatcggtacttcgacagccgcgaggcgctgcgaaccgcgtacgtgcaccgcgagacccgccggctcggccgcgagatcatggtgaagatcgccgatgtcgtcgaacctgccgaacggctgctggtgagcatcaccacgacgttgcggatggtccgcgacaaccccgcgttggccgcgtggtttaccaccacccgcccaccgatcggcggcgagatggccggacggtccgaggtgatcgcggccctggccgcggcattcctcaactcactaggtcccgacgatccgaccaccgtcgaacgccgcgcccgctgggtggtccggatgctcacatcgctgctgatgttccccggccgtgacgaagccgacgaacgagcgatgatcgcggagttcgtcgtcccgatcgtgacacctgcttctgccgccgctaggaaggccggtcaccctggacccgagtga

SEQ ID NO: 185 - DNA, 375 bp, Mycobacterium Tuberculosis
atgacgacgatgattactcttcggcgacggttcgcggtggccgtcgccggcgtcgccactgccgccgcgacgaccgtcaccctggctcccgcaccagcaaatgccgccgatgtctatggcgcaattgcctactccggcaacggctcgtggggccgatcgtgggactacccaacccgggcggctgccgaagccaccgccgtcaagtcgtgtggctactccgactgcaaggtgctcaccagtttcaccgcctgcggcgccgtcgccgccaacgatagggcataccagggaggagttggacccaccttggccgccgccatgaaggacgccctgaccaagctcggcggcggctacatcgacacctgggcctgcaactaa

SEQ ID NO: 186 - DNA, 1896 bp, Mycobacterium Tuberculosis
gtgaccgcgccaccgggcgcacgcccccgtgccgcaagcccgcccccgaacatgcggtcccgcgacttctggggatcggcagcccgactggtgaaacggctggcgccacaacgccggctgagcatcgcggtgatcacactgggaatcgccggcacgacgatcggcgtcatcgttccacggatcctcggccatgccaccgatttgctgttcaacggcgtgatcgggcgagggctaccggggggaatcaccaaggcacaggccgtcgcttcggctcgggcccgtggtgacaacaccttcgccgacctgctgtccgggatgaacgtggtgccgggccaaggtgtggacttcgccgcggtggagcgaacactggcgctggcgttggcgctgtatctggctgcagcgctgatgatttgggcacaagcccggctgctcaacctcaccgtgcagaaaacgatggtcaggttgcggaccgatgtcgaagacaaggtgcaccggctgccgctgtcctacttcgacggacaacagcgcggtgagctgctgagccgggtcaccaatgacatcgacaacctccagtcgtcgctgtcaatgacgatcagccagctggtgacgtcgattctgaccatggtggcggtgctggccatgatggtgtcgatctcgggcctgctggcgctgatcacactgctgacggtgccgctgtcgctgctggtgacacgcgcgatcacccggcggtcacagcccctattcgtagctcactggaccagcaccgggcgcctcaacgcccatctcgaagagacctacagcgggttcacggtagtcaagacgttcggccaccaagcggccgcacgagaacggttccacgagttgaatgacgacgtctaccaggccggtttcggcgcccagttcctctctggtctcgtgcagccggcgacggcgttcatcggcaacctcggctacgtcgcggtcgcggtggccggtggcctgcaggtagccaccgggcagatcacgctcggcagcatccaggcgttcatccagtacatccgccagttcaacatgccgctgagccagctggccgggatgtacaacgccctgcagtccggggtggccagcgcggagcgggtgttcgacgtgctcgacgagcccgaggagtcgccggagcctgagccggagctgccgaacctaaccggacgggtcgagtttgagcacgtgaactttgcttacctcccgggcacgccggtgatccgcgacctgtcgctggtggccgaaccgggtagcacggtggcgatcgtcggaccgacgggagccggcaagaccacgctggtgaacctgctaatgcggttctacgagatcggttccggacgaatcctgatcgacggggtggatatcgcctcggtaagccggcagtcgctgcgatcgcgaatcggcatggtgttgcaagacacctggctctacgacgggaccatcgcggagaacatcgcctacggacggccggaggccaccacagacgagatagtagaagccgccagggcggcccatgtcgaccggtttgtgaacacactgcctgctggctaccagacacgggtcagcggcgacggcggcagcatcagcgtcggcgagaagcaactcattaccatcgcccgcgcctttcttgcccgcccgcagctgttgatcctggacgaggcgaccagctcggtcgatacccgcaccgagctgctcatccagcgagcgatgcgcgagcttcgccgggatcgtacgagtttcattatcgcccaccgactttcgacgattcgcgatgccgaccacatcctggtggtccagaccggccagatcgtcgaacgcggcaaccacgccgagctgttggcccggcgcggggtctattaccagatgacgcgggcctag

SEQ ID NO: 187 - DNA, 492 bp, Mycobacterium Tuberculosis
gtgacggttaccgacgactacctggccaacaacgtggactacgcgagcggtttcaagggcccgctaccgatgccgccgagcaaacacatcgcaatcgtggcgtgcatggacgcccggctggacgtctaccgcatgctgggcatcaaggagggcgaggcacacgtcatccgcaacgccggatgcgtggtcaccgacgatgtgatccgttcactggccatcagccagcggctgctgggaacccgcgaaatcatcctgctgcaccacaccgactgtgggatgctgactttcaccgacgacgacttcaagcgcgccatccaggacgagaccggcatcagacccacgtggtcgcccgagtcgtaccccgacgccgtcgaggacgtccgtcagtcgctgcgccgcatcgaggtcaacccgttcgtcaccaagcacacgtcgctgcgcggcttcgtcttcgatgtcgccaccggcaaactcaacgaggtcacgccctag

SEQ ID NO: 188 - DNA, 1326 bp, Mycobacterium Tuberculosis
gtgcccggtgacgaaaagccggtcggcgtagcggtactcggtttgggcaacgtcggcagcgaggttgtccgcatcatcgagaacagcgccgaggatctcgcggctcgtgtcggtgccccattggtcctgcggggcatcggcgtgcgccgcgtgacgaccgatcgcggcgtgccgatcgaattgttgaccgacgacattgaagagctcgtggcccgcgaggatgtcgatatcgtggtggaagtgatggggccggtggaaccgtcgcgcaaggcgatcctgggcgcccttgagcgcggcaagtccgtcgttacggcgaacaaggctttactcgccacctccaccggcgaattggcacaggccgccgaaagcgcccatgttgatctgtatttcgaggcggccgtggcgggcgccattccggtcatccgtccgctcacccagtcgctggccggcgacacggtgctgcgagtggccgggatcgtcaacggcaccaccaactacatcctctcggcgatggacagcaccggcgctgactatgccagcgccctggccgacgcaagtgcgctgggctatgcggaggctgatcccaccgcagacgtcgaaggctacgacgccgcggccaaggcagcgatcctggcatccattgccttccacacccgggtgaccgcagacgacgtgtatcgcgaaggcatcaccaaggtcactccggccgacttcggatccgcgcacgcgctgggttgcaccatcaaactgctgtcgatctgtgagcgcataaccaccgacgaaggttcgcagcgggtatcggcccgcgtctatccggccctggtacctctgtcgcatccgcttgccgcggtcaacggcgcgttcaatgccgtggtggtcgaggccgaggccgcgggccggctgatgttctacggccagggcgcgggcggcgcgccgaccgcctctgcggtgaccggtgacctagtgatggccgcccgcaaccgggtactcggcagccgcggcccccgtgagtctaaatacgctcaacttccggtggcaccaatgggtttcattgaaacgcgctattacgtcagcatgaacgtcgccgacaagccgggcgtcttgtccgcggtggcggcggaattcgccaaacgcgaggtgagcatcgccgaggtgcgccaggagggcgttgtggacgaaggtggtcgacgggtgggagcccgaatcgtggtggtcacgcacctcgccactgacgccgcactctcggaaaccgttgatgcactggacgacttggatgtcgtgcagggtgtgtccagcgtgatacgactggaaggaaccggcttatga

SEQ ID NO: 189 - DNA, 1809 bp, Mycobacterium Tuberculosis
gtgaccgatacggacctcattacggctggcgaaagtaccgacggcaagccgtcggatgccgctgccacagatcccccagacctcaacgccgacgagccggccggctcgctggccaccatggtgctgcccgaactgcgtgcgctggctaatcgagccggcgtgaagggaacatcgggtatgcggaagaacgaactgatcgctgcgattgaggagatcaggcgacaggccaacggcgccccagccgttgaccggtcggctcaagagcacgacaagggcgaccggccgcccagttccgaggcaccggccacccagggggaacagaccccgaccgaacagatcgattcccaaagccaacaggtccgcccggagcggcgcagcgccacccgtgaagcgggaccctccggttccggtgagcgtgcgggcacagccgcagacgacaccgacaaccgccaaggcggtcaacaggacgccaagaccgaggagcgtggcaccgacgcgggtggcgaccaagggggtgaccagcaggcttcgggcggtcagcaggcgcgcggcgacgaggacggagaagcgcgtcagggccggcgcggacgccggttccgcgatcggcggcgccgcggtgaacgatccggcgacggcgccgaggctgaactgcgtgaggacgacgtcgtccagccggtagccggcatactcgacgtcctggacaactacgcgtttgtgcgcacctccggctacctacccggtccgcacgacgtgtatgtgtcgatgaacatggtgcgcaagaacggcatgcgccgtggtgatgcggtgaccggtgcggtgcgggtgcccaaggaaggggagcaacccaaccagcggcagaagttcaacccgctggtccgcctggacagcatcaacggcggatcggtcgaagacgccaagaagcggcccgagttcggcaaactgacgccgttgtaccccaaccagcggcttcgtctggaaaccagtaccgagcggctgaccacccgggtcatcgacctcatcatgccgatcggcaagggtcaacgcgcgttgattgtgtcgccgcccaaagcgggcaagacaacgatcctgcaggacatcgccaacgcgatcaccaggaacaacccggaatgccacctcatggtcgtgctcgtcgacgagcggcctgaggaggtcaccgatatgcagcgctcggtcaaaggcgaggtcatcgcttcaactttcgaccggccgccgtcggaccacacgtcggtcgccgagctggcgatcgaacgcgccaagcggctggtggagcaaggcaaggacgtcgtggtgctgctcgattcaatcacccggctaggccgcgcttacaacaacgcgtcgccggcgtcgggccggatcctgtccggtggtgtcgattccacggcgttgtacccgcccaagcgcttcctgggggccgcgcgcaacatcgaagagggcgggtcgctgaccatcatcgccactgcgatggtcgagaccgggtccactggtgacacggtcattttcgaggagttcaagggcaccggcaacgccgagctcaagctggaccgcaagatcgccgagcggcgggttttccctgcggtcgacgtgaacccttctggaacccgcaaggacgagctactgctgtcgcccgacgagttcgctattgtgcacaagctgcgccgcgtgctatcgggcctggattcccaccaggccatcgacctgctgatgtcgcagctgcgtaagacgaagaacaactacgaattccttgttcaggtgtccaagaccacgccagggtccatggacagcgactga

SEQ ID NO: 190 - DNA, 486 bp, Mycobacterium Tuberculosis
gtgacgacaccagcgcaggacgcgccgttggtgtttccctctgttgctttccgtccggttcgcctttttttcatcaacgttggactggccgcagtggcgatgttggtcgccggcgtgttcggtcacctgacggtcgggatgttcttgggtctcgggttgctgctgggtttgctcaatgccctgctggtgcggcgttcggccgagtcgatcaccgccaaagagcacccgttaaaacggtcgatggccctcaactcggcatcgcgactggcgattatcaccatcctcgggctgatcatcgcctacattttccggcccgctggattgggcgtcgtgttcgggctggcattcttccaggtgctgctggtggcaacgacggccctgccggtcctgaagaagctgcgcactgcgaccgaggaaccggtcgcaacttattcttccaatggccagaccgggggatcggaaggaaggagcgccagcgatgactga

SEQ ID NO: 191 - DNA, 753 bp, Mycobacterium Tuberculosis
atgactgagaccatcctggccgcccaaatcgaggtcggcgagcaccacacggccacctggctcggtatgacggtcaacaccgacaccgtgttgtcgacggcgatcgccgggttgatcgtgatcgcgttggccttttacctgcgcgccaaagtgacttcgacggatgtgccaggcggggtgcagttgttttttgaggcgatcaccattcagatgcgcaatcaggtcgaaagcgccatcgggatgcggatcgcacccttcgtgctgccgctggcggtgaccatcttcgtgttcatcctgatctccaactggctggcagtcctcccggtgcagtacaccgataaacacgggcacaccaccgagttgctcaaatcggcagcagcggacatcaattacgtgctggcgctggcgcttttcgtgttcgtctgctaccacacggccggtatttggcggcgcggtattgtcggacacccgatcaagttgctgaaagggcacgtgacgctcctcgcgccgatcaaccttgtcgaagaagtcgccaagccaatctcgttgtcgctccgacttttcggcaacattttcgccggcggcattctggtcgcactgatcgcgctctttcccccctacatcatgtgggcgcccaatgcgatctggaaagcatttgacctgttcgtcggcgcaatccaggccttcatttttgcgctgctgacaattttgtacttcagccaagcgatggagctcgaagaggaacaccactag

SEQ ID NO: 192 - DNA, 516 bp, Mycobacterium Tuberculosis
atgggtgaagtgagcgcgattgtcctggccgccagtcaggcggcagaggaaggcggcgagtccagcaacttcctcattcccaacggcacgtttttcgttgtgctggccatcttcctggtggtgctcgctgtcattggcactttcgtggtgccgccgatcttgaaggtcttgcgggaacgtgacgctatggtcgccaaaacgctggccgacaacaagaagtcggacgagcagttcgccgccgcacaggccgattacgacgaagccatgacggaagcccgagtccaggcgtcgtccttgcgcgacaatgcccgggcagatggccgtaaagtcatcgaggacgcacgcgtccgggccgaacaacaggtggcatcgacgttgcagaccgcccatgagcaattgaagcgggagagggacgccgtggaactcgatctgcgtgcccacgtgggcaccatgtcggcgactctggccagtcgaattctcggtgttgacctcaccgcttcagccgcgacgaggtaa

SEQ ID NO: 193 - DNA, 582 bp, Mycobacterium Tuberculosis
atggcagtccacctgacccgcatctatacccgaaccggcgatgacggaacgacgggattgagcgatatgtcccgtgtcgccaaaaccgacgcccgactggtggcatacgcggattgcgacgaggccaacgccgcgatcggggccgccctggcgctgggccacccggacactcaaatcacggatgtgctgcggcagatccagaacgacttgttcgatgccggtgcggatctgtcgactccgatagtggaaaacccgaagcaccctccgctgcgaatcgcacagtcctatatcgatcggctcgaagggtggtgcgacgcatacaacgcgggcctgcctgcactaaaatcctttgtactacctggtggttcaccgctgtcggcgctgttgcacgtcgctcgcaccgtcgttcgccgggccgagcgatccgcgtgggccgcggtcgacgctcacccggaaggcgtcagcgtactgccggcgaaatacctgaaccggctgtcggatctgctgttcatcctgtcgcgggtagccaatcccgacggtgacgtgctgtggcggcccggtggtgataggacggcgagctag

SEQ ID NO: 194 - DNA, 498 bp, Mycobacterium Tuberculosis
atgattcactaccgcaccatcgatagccccatcgggccattaaccctggccgggcatggctcggtgttgacgaacctgcggatgctcgagcagacgtatgagccaagccgcacacactggacacccgaccccggcgcattttctggcgctgtcgaccaactcaacgcttatttcgccggcgagctcaccgaattcgatgtggaacttgacctccggggaaccgactttcagcaacgagtatggaaagcattgctgacaatcccgtacggggaaacccggtcctacggggaaatcgccgaccagatcggcgcccccggcgccgcacgcgccgtgggattggccaacggccacaatcccatcgccatcatcgtcccgtgccaccgcgtgatcggcgccagcggaaagctcaccgggtacggcggtggaatcaaccggaaacgagctctgctcgagttggagaaaagccgggcgcccgcagacttgacgctcttcgactga

SEQ ID NO: 195 - DNA, 1491 bp, Mycobacterium Tuberculosis
gtgcacgacgacttcgaacgctgctaccgggcgatccagtccaaagacgcccggttcgacggctggttcgtcgtcgcggttttgaccaccggtgtctactgccggccgagttgccccgtccggccaccgttcgcgcgcaatgtccggttcctgccgactgcggcggccgctcagggggagggattccgggcctgcaaacggtgccgccccgacgcctcgcctgggtctccggaatggaatgtgcgtagtgacgtcgtggcgcgggcgatgcggctgattgccgacggaacggtggaccgcgacggtgtcagcggcctcgcggcccagctcggttacaccattcgccagctggagcggctgttgcaggccgtggtcggcgccggtccgctcgcgttggcccgcgcccaacgcatgcagaccgcccgggtgctgatcgagaccacgaacctgccgttcggcgatgtcgcattcgccgccgggttttccagcatccgtcagttcaacgacaccgttcgcctggcgtgcgacggcacaccgacggcattgcgtgcgcgcgcggccgcccgattcgagtctgccaccgcatcagcgggcacggtgtcgctgcggctacccgtccgtgcaccattcgccttcgagggtgttttcggccatctggccgccaccgcggtgccgggttgcgaagaggtccgcgatggtgcgtaccgacgcacgctacggctcccatggggcaacggcatcgtcagcctgacgccggcacccgatcatgtgcgctgcctgcttgtgctcgatgatttccgcgacctgatgacggccactgcacgttgccgacggctgctggacctcgacgccgatcccgaagcgatcgtcgaggcgctgggcgccgatccggatctgcgcgcagtggtgggcaaggcacccgggcaacgcattccccgcacagtcgacgaggcagaattcgccgtgcgggcggtcctcgcccaacaggtatcgacgaaggccgcaagcactcacgcgggccgactggtcgccgcctacggacggccggtccacgatcgccacggcgctttgacccacaccttcccgtcgatcgagcagctcgctgagatcgatcccggccatctggccgtccccaaggcgcgtcaaaggaccataaacgcgctcgtcgccagccttgccgacaaaagtctggtcctggacgccggatgtgactggcaacgcgcccgcgggcagttgctagcgctgcccggagtgggcccctggaccgcggaggtcatcgccatgcgcggcctcggtgacccggacgcctttccggccagtgatctcggcctgcggctggccgccaaaaagctgggcctgcctgcacaacgacgagccctgacggtgcacagcgctcgctggcgcccctggcgctcctatgccacccagcacctgtggaccaccctggaacatccggtaaaccaatggccaccgcaggagaagatcgcatga

SEQ ID NO: 196 - DNA, 297 bp, Mycobacterium Tuberculosis
atggctcggcgccgcaaaccgctgcaccggcagcggccggaaccgccgtcgtgggccctgcgccgagtggaagcggggcccgatggccacgagtatgaagtacgaccggtcgctgcggcccgcgccgtcaagacctatcgctgtccggggtgtgatcacgaaatccgttccggtactgcacatgtggtagtgtggccgactgacttgccgcaagccggcgtcgatgaccggcgtcactggcacaccccgtgctgggcgaaccgagcaacccgcggtccgactcgaaaatggacctag

SEQ ID NO: 197 - DNA, 2106 bp, Mycobacterium Tuberculosis
gtgagtggccgggcaatcggaacggaaacggagtggtgggtgcccggtcgtgtcgaaatcgatgacgtcgcgcccgtcgtttcgtgcggcgtatatcccgccaaggcggtggtcggcgaggtggtcccggtcagcgcggcggtctggcgtgaaggccacgaggccgtcgcagcgacgctggtcgtgcgctacctcggagtgcgttacccacacctcaccgacagaccccgggccagggtgcttccgacgccgagcgagccccaacaacgcgtcaagccgctgctgatcccgatgacgagcggccaggagcccttcgttttccacggccagttcacccccgaccgggtcggattgtggaccttccgggtggatggttggggtgacccgatccacacctggcgccatgggctgatagccaagctagatgccggccagggagagaccgagctgtccaacgacctgttggtaggcgcggtgctgttggagcgcgcggcgaccggtgtgccgcgcgggttacgcgatcccctcctggcggccgcggcagcgctgcggacccccggtgacccggtgacccgcaccgcgttggccctgacaccggaaatcgaagagctgctggccgactatccgctgcgggacctggtcacccggggcgagcaattcggcgtctgggtggatcggccgttggcccggttcggcgcttggtatgagatgtttccgcgctcaaccggcgggtgggacgacgacggcaacccggtacacggcaccttcgccaccgctgcggcagaacttccgcgcatcgccggcatggggttcgacgtggtgtacctgccgccgatccatccaattggcaaggtgcatcgcaagggtcgcaacaactcgcccaccgccgcaccgacagacgtgggatcgccgtgggcgatcggtagcgatgagggcggtcacgataccgttcatcccagcctgggcaccatcgacgacttcgacgacttcgtctccgcggcacgcgatctgggcatggaggtcgcgctggacctggcgctgcaatgcgcaccggatcatccgtgggcccgcgaacaccggcagtggttcaccgagctgccggacggcaccatcgcctacgcggagaatccaccgaagaagtaccaggacatctatccgctcaacttcgacaacgatcccgagggcctgtacgacgaagtgctgcgcgtggtgcaacattgggttaaccacggcgtcaagttctttcgcgtcgacaatccccacaccaaaccacccaacttctgggcctggctgatcgcgcaggtgaagaccgtcgaccccgacgtgctgttcctgtccgaggctttcaccccgcccgcccgccagtacgggctggccaagctcggcttcacgcagtcctacagctatttcacctggcgcacgaccaagtgggagctcaccgaattcggcaaccagatagccgaactcgccgactaccgtcggcccaacctgttcgtcaacaccccggacatcctgcacgcggtgctgcagcacaacggtccaggcatgttcgccatccgcgcggtgctggccgccaccatgagcccagcctgggggatgtactgcggttatgagcttttcgagcaccgtgcggtgcgcgagggcagcgaggagtacctggactcggagaagtacgaattgcgtccccgcgactttgccagcgcgctggaccagggtagatctttgcagccgttcatcacacggctcaatataattcgccggctgcacccggcgtttcaacagttgcgtaccattcattttcaccacgttgacaacgacgcgttgctggcctacagcaagttcgacccggccaccggcgactgcgtgttggtggtggtgacactcaacgcatttggtcctgaagaagctacgctgtggttggacatggcggcgttgggcatggaggactacgaccggttttgggtgcgcgacgagataaccggcgaagaataccaatgggggcaagccaattacatccgcatcgacccagcacgggcagtcgcccacatcatcaacatgccagccgtgccctacgagagccgaaacacgctgctgcgcaggaggtga

SEQ ID NO: 198 - DNA, 2592 bp, Mycobacterium Tuberculosis
gtgaaagcccttcgccggtttaccgtccgagcccacctacccgaacgtcttgccgccctggaccagctgtctaccaatctgcggtggtcctgggacaaaccgacacaggatctgttcgcggcgatcgaccctgcactgtgggagcaatgcggtcatgatccggtggcgctgctgggcgcggtgaacccagcgcgtctcgacgaacttgcgctggacgcagaatttttgggcgccctcgatgagctggcggccgacttgaacgactacctgagccgtccgctgtggtatcaggagcagcaggacgccggggtagccgcacaagccctgccgaccgggatcgcgtacttctcgctggagttcggggtagccgaggtgttgcctaattactcgggcggtcttgggattctcgccggcgaccatctgaaatccgcgtccgatctgggcgtgccgctgatcgcggtggggttgtactaccgctccggctacttccggcaatcgcttaccgcggacggctggcagcacgagacctacccatcgctggacccgcaagggctgccgttgcgtctgctcaccgacgccaacggggatccagtgctggtcgaggtcgccctgggagacaacgccgtgttgcgcgcccggatctgggtagcgcaggtgggtagggttccgttgctcttgttggattctgatatcccggagaacgagcacgacctgcgcaacgtcaccgaccgcctctacggtggcgaccaggaacatcgcatcaaacaagagatcctggccggcatcggcggggtgcgggcgattcgtgcgtacaccgccgtcgaaaagctcaccccgcctgaggtcttccacatgaacgagggccacgccggattcctcggcatcgaacgcatccgtgaactggtcaccgatgcgggtttggatttcgacaccgcattgactgtggtgcggtccagcacggtgttcaccactcatactcccgtccccgccgggatcgaccggttcccgctcgagatggtgcagcgctacgtcaatgaccagcgcggcgatggccggtctcggctgttgcctgggttgccggccgaccgcatcgtcgcgttgggcgccgaggacgatccggccaaattcaacatggcacacatgggcctgcggctggcgcagcgggccaacggcgtctcgttgctgcatggccgggtcagtcgtgccatgttcaacgagctgtgggcgggattcgaccccgatgaggtgccgatcggctccgtcaccaacggtgtgcacgcgcccacctgggcggcgccgcagtggttgcagctgggccgcgagctggccgggtcggactctttgcgcgagcccgtcgtttggcagcgactgcatcaggtcgatcctgctcatctgtggtggatccgctcacaactgcggtcgatgctggtggaggacgtccgggcgcggttgcggcaatcatggctggaacgtggtgcaacggatgccgaactgggttggatcgcgacggcattcgatccgaatgtgctcaccgtcggcttcgcccggcgggtcccgacctacaagcggctgacgttgatgttgcgcgatcccgatcggctcgagcaactgctgctcgacgaacagcggccgatccagctgatagtggctgggaagtcgcacccggccgacgacgggggcaaagcgctgatccagcaggtggtgcggttcgccgaccggccgcaggtccgccaccgcatcgccttcctgccgaactacgacatgtcgatggcccggctgttgtactggggctgcgacgtctggttgaacaacccgctgcggccgctagaggcgtgtggtacctcgggcatgaaaagcgcgcttaacggcgggctgaatttgtcgatccgtgacggctggtgggacgagtggtacgacggcgaaaacggttgggagataccgtctgccgacggtgtggcggacgagaaccgtcgcgacgacctggaggccggcgcgctctacgacctgctggcacaagccgtggcaccgaagttctacgagcgcgatgaacgcggggtgccgcagcggtgggtagagatggtccggcataccctacaaacgctcgggcccaaggtgctggcttctcgaatggtgcgcgactacgtcgagcattactacgcgccggcggcgcagtcttttcgccggaccgcgggcgcccagttcgacgcggcccgcgagctggccgactaccgccggcgcgcggaagaagcgtggcccaagatcgagattgccgacgtcgacagcaccggtctgccggatactccactgctcgggtcccagctgaccctgacggcaaccgtgcggctggccgggctgaggccaaacgacgtgacggtgcagggggtgctgggcagggtcgacgccggcgatgtgctaatggatccggtcaccgtcgagatggcgcataccggcaccggcgacggcggctacgagatcttctcgacgacgacgccgctgccgctggcggggccagtcggatacaccgtgcgggtgctgcctcgccacccgatgctggccgccagcaacgagctcggcctggtcaccctggcctga

SEQ ID NO: 199 - DNA, 1995 bp, Mycobacterium Tuberculosis
gtgtccgagtcggtatccatgtctgtgcctgagctgcttgccatcgccgtggcggcacttggcggcacccggcgtcgcggccagcaagagatggccgccgcggtagcgcatgcgtttgaaaccggtgagcacttggtggtccaggccggcaccggaaccggcaagtcgctggcgtatctggttcccgcgatcatccgcgctctttgcgacgacgcgccggtcgtggtgtcgacggcgacgatcgctttgcaacgtcaactcgtcgatcgtgacctgccccagctggtagattcgctcaccaatgcgctcccccgccgaccgaagttcgccctgctcaaaggtcgacggaactacctgtgcctgaacaagatccacaactcagtcacagccagtgaccatgacgacgagcggccgcaggaggagctcttcgacccggtggcggtcaccgcgctgggacgcgatgtgcaacggctaaccgcctgggcttcgacgaccgtgtctggtgatcgcgacgaccttaagcccggtgtgggagaccgatcctggtcgcaggtcagcgtttcggcgcgggaatgcctcggcgtggcccgctgcccgtttggctcggagtgcttctccgaacgggctcgtggagcggccggcctggccgatgtcgtcgtcaccaaccacgcgctgctggccatcgatgccgtcgccgaatcggcggtactgccagaacatcggctgctggttgtcgacgaggctcacgaattggccgaccgggtgacctcggtagccgccgctgagctgacgtctgccacgctcggtatggccgcacgacggatcacccggctggtcgacccgaaagtgacccagcggcttcaggcggcttcggctaccttcagttcggcgattcacgacgccagaccgggccgcattgattgcctcgatgacgagatggcgacctatctgagcgcgctgcgcgatgcggccagtgcggcgcgctcagcgatcgataccggcagcgacaccacgacggcgtccgtgcgcgccgaagcgggcgcggtactgaccgaaatatccgataccgcgtcacgaatcctggcgtcgttcgcccccgctatccctgaccgcagcgacgtggtttggctggagcacgaggacaaccacgaatcggctcgcgcggtgctgcgggtggctccgctatcggtggccgagctgttggccacccaggtgttcgcccgtgcaacgaccgtattgacctcggcaacgctgacaatcggcgggtcgtttgacgcgatggccacggcatggggcctgactgcagacacgccctggcgtggcctggacgtgggctcgcctttccagcacgcaaagtcgggaatcctctacgtggccgcccatctcccgccgccgggccgagacggcagcggctcggccgaacaactgaccgagatcgccgaactcatcaccgctgcaggtgggcgcaccctggggctgttctcgtccatgcgggccgcccgggcagccaccgaggccatgcgcgaacggctgtccacgccggtgttgtgtcagggcgacgacagtacgtccacgctggtggagaagttcaccgccgatgcggcgacctccctgttcggcacgctgtcgctgtggcagggggtcgacgtgccgggaccgtcgctgtcgttggtgttgatcgaccgcatcccgttcccccggccggacgatcccctgctgagtgcccgccagcgtgcggtggccgcccgtggcggcaacggcttcatgacggtcgccgccagccacgcggcgctgctgctggcacagggatccggccggctgttacggcgcgtcaccgatcggggcgtggttgcggtgctcgattcacggatggctaccgcccgctatggcgaattcctgcgagcctcgctgccgcccttttggcagaccaccaacgccacgcaagtgcgcgcggccctgcggcgccttgcgcgagcagacgcaaaagcccactaa

SEQ ID NO: 200 - DNA, 657 bp, Mycobacterium Tuberculosis
atgccgccggtttgtgggcgacgatgcagcaggaccggtgagattcgaggatattcgggatccatcgtgcgcaggtggaagcgcgtcgagacccgcgatggtccccgctttcgatcgtcgttggctccgcatgaggccgccctgctcaagaacctggcaggcgcgatgatcgggctgctcgacgatcgcgactcttcttcgccgtcagacgaactcgaggagatcaccggcatcaagaccgggcatgcgcagcgtccgggtgacccgaccttgcgtcggctgttgccggatttctaccgtcccgatgacctggatgacgatgatccgacggccgtcgacggctccgagagcttcaacgctgccctgcgcagcctgcacgaacctgagattatcgacgccaaacgtgttgccgcgcagcagttattagacacggttccggacaatggcggccggttggagctgacggaatccgacgccaatgcttggatcgccgccgtcaacgaccttcggctggcgctcggagtgatgcttgagatcggcccgcgtgggccggagcgcctgccggggaaccacccgttggccgcgcacttcaatgtctaccagtggctgacagtcctgcaggaatacctcgtgctggtgctgatggggtctcgatga

SEQ ID NO: 201 - DNA, 780 bp, Mycobacterium Tuberculosis
gtgtccaagcgagaagacggccggctcgaccacgagcttcgcccggtgatcatcacccgcggtttcaccgaaaacccggcgggatcggtgctcatcgaattcggtcacaccaaggtcctgtgcaccgccagcgtcaccgaaggggtgccccggtggcgtaaagcaaccggtctggggtggctcaccgcggagtacgccatgctgccgtcggccacccacagccgctctgatcgcgagtcggtgagaggcaggcttagcgggcgtactcaggaaatcagtcggctcatcggccggtcgctgcgcgcatgcatcgacctggcggcgctgggggagaacacgatcgctatcgattgtgatgtgttgcaggccgatggtggcactcgaaccgcggccatcaccggcgcctacgtggcattggccgacgcagtgacctacttgtcggcggcgggtaagttgtccgaccccaggccattgtcgtgtgccatcgccgcggtcagcgtcggtgttgtcgacggcaggatccgggtggatctgccctacgaggaagattcgcgcgccgaggtcgacatgaacgtcgtcgctaccgacaccggaaccctggtagagattcagggcaccggcgaaggcgcgacgttcgcacgttcgacactggataagctgctggacatggcactgggcgcctgcgacacgttgtttgccgcacaacgcgacgcgttggcgctgccgtatccgggtgtgctgccgcagggaccgccaccgccgaaggcgtttggcacctga

SEQ ID NO: 202 - DNA, 381 bp, Mycobacterium Tuberculosis
gtgtccactacccgccgtcgcagacccgcgctgatcgcgttggtgatcatcgcgacctgtggttgcctggccctgggttggtggcagtggaccaggtttcaatcgacctcgggcacctttcaaaatctgggttacgcgttgcagtggccattgtttgcttggttctgcgtctacgcgtaccgcaacttcgttcggtatgaagagacgcccccgcaaccgcccaccggcggcgccgccgccgagatacctgccggattgctgcccgagcggccgaagccggcgcagcagccacccgacgatcccgtactacgggaatacaacgcctacctagccgagctagccaaggacgatgccaggaagcagaacaggaccaccgcatga

SEQ ID NO: 203 - DNA, 1191 bp, Mycobacterium Tuberculosis
gtggtggacttcggggcgttaccaccggagatcaactccgcgaggatgtacgccggcccgggttcggcctcgctggtggccgccgcgaagatgtgggacagcgtggcgagtgacctgttttcggccgcgtcggcgtttcagtcggtggtctggggtctgacgacgggatcgtggataggttcgtcggcgggtctgatggtggcggcggcctcgccgtatgtggcgtggatgagcgtcaccgcggggcaggccgagctgaccgccgcccaggtccgggttgctgcggcggcctacgagacggcgtatgggctgacggtgcccccgccggtgatcgccgagaaccgtgctgaactgatgattctgatagcgaccaacctcttggggcaaaacaccccggcgatcgcggtcaacgaggccgaatacggggagatgtgggcccaagacgccgccgcgatgtttggctacgccgccacggcggcgacggcgaccgaggcgttgctgccgttcgaggacgccccactgatcaccaaccccggcgggctccttgagcaggccgtcgcggtcgaggaggccatcgacaccgccgcggcgaaccagttgatgaacaatgtgccccaagcgctgcaacaactggcccagcccacgaaaagcatctggccgttcgaccaactgagtgaactctggaaagccatctcgccgcatctgtcgccgctcagcaacatcgtgtcgatgctcaacaaccacgtgtcgatgaccaactcgggtgtgtcgatggccagcaccttgcactcgatgttgaagggctttgctccggcggcggctcaggccgtggaaaccgcggcgcaaaacggggtccaggcgatgagctcgctgggcagccagctgggttcgtcgctgggttcttcgggtctgggcgctggggtggccgccaacttgggtcgggcggcctcggtcggttcgttgtcggtgccgcaggcctgggccgcggccaaccaggcggtcaccccggcggcgcgggcgctgccgctgaccagcctgaccagcgccgcccaaaccgcccccggacacatgctgggcgggctaccgctggggcaactgaccaatagcggcggcgggttcggcggggttagcaatgcgttgcggatgccgccgcgggcgtacgtaatgccccgtgtgcccgccgccgggtaa

SEQ ID NO: 204 - DNA, 786 bp, Mycobacterium Tuberculosis
atggctgagacaaccgaaccaccgtcggacgcggggacatcgcaagccgacgcgatggcgttggccgccgaagccgaagccgccgaagccgaagcgctggccgccgcggcgcgggcccgtgcccgtgccgcccggttgaagcgtgaggcgctggcgatggccccagccgaggacgagaacgtccccgaggagtatgcagactgggaagacgccgaagactatgacgactatgacgactatgaggccgcagaccaggaggccgcacggtcggcatcctggcgacggcggttgcgggtgcggttaccaagactgtccacgattgccatggcggccgcagtcgtcatcatctgcggcttcaccgggctcagcggatacattgtgtggcaacaccatgaggccaccgaacgccagcagcgcgccgcggcgttcgccgccggagccaagcaaggtgtcatcaacatgacctcgctggacttcaacaaggccaaagaagacgtcgcgcgtgtgatcgacagctccaccggcgaattcagggatgacttccagcagcgggcagccgatttcaccaaggttgtcgaacagtccaaagtggtcaccgaaggcacggtgaacgcgacagccgtcgaatccatgaacgagcattccgccgtggtgctcgtcgcggcgacttcacgggtcaccaattccgctggggcgaaagacgaaccacgtgcgtggcggctcaaagtgaccgtgaccgaagaggggggacagtacaagatgtcgaaagttgagttcgtaccgtga

SEQ ID NO: 205 - DNA, 1428 bp, Mycobacterium Tuberculosis
atgggaaaccttgacctccttctccgcctctctggacggatcgttaaaggatgtcgaccgctcggcagcgtagcactcgcacgctgcgggcccgcggtgcggtggccgcggtggcccaggcctgctatactcgaacacatgttcgatttagtgagcctcgcgggcgtggattcgcgcgacgatgaggcgagcctgaccgcgcggatcgccgagctggagcgggtcaaatcggccgcggccgccggtcaggcacgtgctgcggcggcgctggacaagttgcgtcgctgcaatgaggcggatgcgggggtgccggcacggcggcgcgggcgtggggtggccagtgaagtagcgctggcgcgacgggattcgccggcgcgcggcgggcgccacctggggttcgcgaaggcgttggtgtatgagatgccgcacacactcgccgcgctcgaggtcgggcggctatcggagtggcgggccacgctgatcgtgcgggagtcggcctgcctggacgtcgaggatcgccgcgcactcgacgccgagctgtgcgccgacatgtccgcattggacgggatgggtgatgcgcggatcgccgccgcggcccgggcgattgcctaccggctcgatgcccaggcggtggtggagcgggccgccagggccgagaccgaacgcacggtgacgatccgcccggcccccgacaccatgacctgggtgacggcgttgcttccggtggcccgaggcgtgtcggtctatgcggcgctcaagcgggccgccgacacgacattcgacgatcggacacggggccaggtaatggccgacacgttggtcgagcgggtcaccggacaacccgccgaggcggcccaaccggtagcggtcaacctggtgctctccgacgagacactgttagctggcgaccgcgccccggcggtggtcgacgggtatggccccatcccggcggccgtggcccgcaacctggtgcgcgacgcggttgccgatacgcggtcacgggccacgctgcgccggctctaccgtcatccgcgctcgggggccttggtggcgatggaatcgcgggcacgccggttcccgaaggggctggccgcgttcatcgggttgcgcgatcagcgctgtcgcatgccctactgcgatgccccgatccgccaccgtgaccacgcccagccgcatcatcgaggcggcccgaccaccgcgaccaacggcctcggatcgtgtgaacgctgtaactacgtcaaggaagctcccggctggcgcgtcagcaccgacacggacgaaaccggccgtcacacagctgaattcaccacgcccaccgggatgtactatcactgcaccgcgccaccactgcccgggccgttggagatagacgttagccaggtggaagccagaatcggtgtcgccctcacccacctacacgccgcctaa

SEQ ID NO: 206 - DNA, 1620 bp, Mycobacterium Tuberculosis
atgaccgagccgtggatagccttccctcccgaggtgcactcggcgatgctgaactacggtgcgggcgttgggccgatgttgatctccgccacgcagaatggggagctcagcgcccaatacgcagaagcggcatcagaggtcgaggaattgttgggggtggtggcctccgagggatggcaggggcaagccgccgaggcgtttgtcgccgcgtacatgccgtttctggcgtggctgatccaagccagcgccgactgcgtggaaatggccgcccagcaacacgtcgtcatcgaggcctacactgccgcggtagagctgatgcctactcaggtcgaactggccgccaaccaaatcaagctcgcggtgttggtagcgaccaatttctttggcatcaacaccattcccattgcgatcaatgaggccgagtacgtggagatgtgggttcgggccgccaccacgatggcgacctattcaacagtctccagatcggcgctctccgcgatgccgcacaccagccccccgccgctgatcctgaaatccgatgaactgctccccgacaccggggaggactccgatgaagacggccacaaccatggcggtcacagtcatggcggtcacgccaggatgatcgataacttctttgccgaaatcctgcgtggcgtcagcgcgggccgcattgtttgggaccccgtcaacggcaccctcaacggactcgactacgacgattacgtctaccccggtcacgcgatctggtggctggctcgaggcctcgagttttttcaggatggtgaacaatttggcgaactgttgttcaccaatccgactggggcttttcagttcctcctctacgtcgttgtggtggatttgccgacgcacatagcccagatcgctacctggctgggccagtacccgcagttgctgtcggctgccctcactggcgtcatcgcccacctgggagcaataactggtttggcgggcctatccggcctgagcgccattccgtctgctgcgatacccgccgttgtaccggagctgacacccgtcgcggccgcgccgcctatgttggcggtcgccggggtgggccctgcagtcgccgcgccgggcatgctccccgcctcagcacccgcaccggcggcagcggccggcgccaccgcagccggcccgacgccgccggcgactggtttcggaggcttcccgccctacctggtcggcggtggcggcccaggaatagggttcggctcgggacagtcggcccacgccaaggccgcggcgtccgattccgctgcagccgagtcggcggcccaggcctcggcgcgtgcgcaggcgcgtgctgcacggcggggccgctcggcggcgaaggcacgtggccatcgtgacgaattcgtcacgatggacatgggtttcgacgcggcagctccggccccagagcaccagccgggtgcccgggcgtccgactgtggtgcgggacctatcggatttgctggcacggtgcgcaaagaggcggtcgtgaaagcggcggggttgaccacgctggccggtgacgacttcggcggcggcccaacgatgccgatgatgcccggcacctggacccatgatcagggcgtgttcgacgagcatcgctga

SEQ ID NO: 207 - DNA, 1386 bp, Mycobacterium Tuberculosis
atggccaccgccaccacccagcggcccctgaagggaccggccaagcggatgagcacctggacgatgacccgggaagccatcaccatcggattcgacgccggcgacggcttcctgggccggctacgcggcagcgacatcacccgatttcgttgtgctggcagacgttttgtctcgatcagtcaccccgactacgtcgaccatgtgctgcacgaggcccgcctgaaatatgtcaaatccgacgaatacggaccgatccgggccaccgccggtcttaacttgctcaccgacgagggcgactcatgggcaagacatcgcggcgcgttaaactcgaccttcgcccggcgccacctgcgcggactcgtcggtctgatgatcgacccaatcgccgacgtcaccgccgcgcgggtgcccggcgcgcagttcgacatgcaccaaagcatggtcgagacgacattgcgggtagtcgccaacgccctgttcagccaggacttcgggccgttggtgcagtccatgcacgatcttgcgactcgcggcctgcggcgggcggaaaagctggagcggctggggctgtgggggctgatgccgcggacggtttacgacacgctgatctggtgtatctactcgggtgttcatctgccgccgccgttgcgggaaatgcaagagatcacgctgaccctggatcgcgccatcaactcggtgatcgatcggcgactggccgagccgactaactccgcggacctgctcaacgtgttgctgagcgccgacggcggaatctggccccgccagcgagtacgcgatgaagctctgacgttcatgctcgccggccacgaaaccaccgccaacgccatgtcctggttctggtatctgatggcgctgaacccgcaggcccgcgaccacatgctcaccgagctggacgacgtgctgggcatgcgccgcccgaccgccgacgacctgggcaagctggcctggaccaccgcgtgcctgcaggaatcgcaacgctacttctcgtcggtgtggataatcgcgcgcgaggccgtcgatgatgacatcatcgacggacaccgaattcgccgcggcaccaccgtcgtcatcccgattcaccacattcaccacgacccgcgctggtggcccgacccggatagattcgatcctggccggtttttgcggtgccccacggaccgtcctcgctgcgcatacctgccgttcggtggcggccgacgcatctgcatcggacagagcttcgccctgatggagatggttttgatggcggcaatcatgagtcaacacttcacctttgacctcgcccctggctatcacgtcgaactcgaggcgacgctgaccctgcgacccaagcacggagtacacgtcatcgggaggaggcgatga

SEQ ID NO: 208 - DNA, 516 bp, Mycobacterium Tuberculosis
gtggccaccatcggggaagtcgaggtattcgtcgaccacggcgccgacgacgtattcatcacctacccattgtggatcggcacacgccaagccgaccggctccgtcagctggctgaccgcgctcgcatcgctgtcggtgcgggcaccgccgagggcgcttcgaacaccggcgcacggctcgcagacgccgctggcgcgatcgatgttctcatcgaaatcgacagtggccatcaccgcagcggcgtccgtgccgaacaagtgttggaggtcgcccacgccgtcggtgaggctgggcttcacctggtgggggtgttcaccttccccggtcacagttatgcgccaggtaaacccggcgaagccggcgagcaagagcggcgcgctctcaacgacgcggcgaacgcgctggtcgcggtgggcttcccgatcagctgccgcagcggtgggtccactcccaccgcattgctcaccgccgcggacggggcctccgagacgtcccggcgtctatgtgctcggtga

SEQ ID NO: 209 - DNA, 762 bp, Mycobacterium Tuberculosis
atgaccgtagtccccggcgcgccgtcgaggccagcttctgcggtctcgcgaccaagttatcgtcaatgtgtgcaagcttcggcccaaacatcggcgaggcggtatagcttcccgtcgtaccggcgaccgccagccgagaagctcgttttcccagtgttgctggggattctcacgctgctgctgagtgcgtgccagaccgcttccgcttcgggttacaacgagccgcggggctacgatcgtgcgacgctgaagttggtgttctccatggacttggggatgtgcctgaaccggttcacctacgactccaagctggcgccgtctcgtccgcaggtcgttgcttgcgatagccgggaggcccggatccgcaatgacggattccatgccaacgctccgagttgcatgcggatcgactacgaattgatcacccagaaccatcgggcgtattactgcctgaagtacctggtgcgggtcggatactgctatccggcggtgacgacccccggcaagccgccatccgtgctgctgtacgcgccgtcggcgtgcgacgaatcgctgccttcaccgcgggtagccaccgcgcttgtgcctggaacacgttctgcaaaccgggagttcagccgattcgtcgtcaccgagatcaagagcctcggtgccggagggcgctgcgattccgcgtcagtctctctgcagccgcccgaggaaatcgaagggccagcaatacccccggcaagcagccaattggtgtgcgtggcaccgaagtaa

SEQ ID NO: 210 - DNA, 1269 bp, Mycobacterium Tuberculosis
gtggctgaagctggtggcgggcccatttcggtgatcgcccggcatatgcagttgattcgcgatgacttcatctccgagttgtttgacaagatgaaggcggagattcgggggctggattacgacgcgcggatggcggacctgtggcgggcgagcatcaccgagaatttcgtgacggccgttcactatttggatcgcgatacgccgcagtccttggtggaggctccagcggccgcgctggcatacgcccgcgccgcggcgcagcgtgatattccgttgtccgggttggttcgggcgcaccggctcgggcatgcgcgtttcttggaggtggcgatgcagtacgtgtcgctgctggagcccgctgaccgggtgtcgacgatcatcgagctggtgaatcgctccgctcgcctcgttgacctggtggccgaccagttgattgtcgcctatgagcacgaacacgatcgctggctgagtcgccgcagcggtctgcaacagcaatgggtcagcgagctgctcgccgataccccggtcgacgttccgcgggccgagcgcgcgttgggctatcggttggacggtgtgcatatcgccgcggtggtatgggtcgattcggcggtgcccatcggtgatgtggtggcgcaattcgaccaggtgcgctgcttgctggccggggagctgggccccgaactgggccccgtggcgaactcgctgatggtgccgaccgatgagcgcgaggcacggctgtggttttcgcccgcgcccacgcgggccttcgccccgtcgcggattcgcgcggcgttcgagtcggcgggaatccgggcgcgtttggcgtgcggtcgggtaggggacgggctgcgtgggttccgggcgtcgttgaaacaggccgaacgagtgaaggcgttggccctggccggtggcgcccggcccggcggccgggtcatgttttatgacgatgtcgcgccagtcgcgttgctggccgacgatctagaggaactgcggcggttcgtcaccgatgtgctgggtgacctgagtgttgacgacgagcgcaatagctggctacgcgagacgttacgggagttcttgctgcgtaaccgcagctacgtcgccacggccgacgcgatgatcctgcaccgcaacaccattcaataccgggtgatccaggcgatggaactatgcggacagaatctcgacgatcccgatgccgcgtttcgggtgcagatggcgctggaggtctgccgctggatggcaccggcggtgctccgcgccaaacaatag

SEQ ID NO: 211 - DNA, 1239 bp, Mycobacterium Tuberculosis
atgagcgttgcaaacctcaaggatctactcgccgaaggtgtttcggggcgtggagtgctggtgcgctccgatctcaacgttccgctcgacgaggacggcaccattaccgatgcgggccgcatcatcgcgtcggcgccgacgttgaaggcgttgctcgacgccgacgccaaggtggtggttgccgcgcacttgggacgtcccaaggacgggccggacccgacactgtcgctggcgccggtcgccgtggcgctgggtgagcaactcggccggcacgtccagctggctggagacgttgtcggcgccgatgcgctggcccgcgccgaggggctcaccggcggcgacatcctgctgctggagaacatccgcttcgacaaacgcgaaaccagcaagaacgatgacgaccggcgggcactggccaagcagctggtcgaactggtcggaacgggaggcgttttcgtctccgacggctttggggtggtgcaccgcaagcaagcctcggtctatgacatcgcaaccctgttgccgcactacgccggcacgctggtcgccgacgagatgcgggtactggagcagttgaccagctcgacccagcggccctatgcggtagtgctcggcggatcaaaggtgtccgacaagctgggtgtcatcgagtcgctggcgaccaaggcggacagcattgtgattggcggcggaatgtgcttcacattccttgctgcacagggattttcggttggcacatcgctgctggaagacgacatgatcgaagtctgtcgcgggctgctggaaacctatcacgacgtgttgcggctgcccgtggatctagtggtcacggagaagttcgccgccgactcgccgccccagacggtcgacgtcggcgctgtgcccaatggcttgatgggcctggatatcgggccgggatcgatcaaacggttcagcacgctgctgtccaacgccgggaccatcttctggaacgggccgatgggagtattcgagttcccggcttatgcggccggcaccagaggcgtcgccgaggcgatcgtcgccgccaccggcaaaggggcgtttagtgtggtcggcggcggtgactccgcggccgcagtgcgcgcgatgaacatccccgagggcgccttctcacacatatccaccggcggcggtgcctcgctggaataccttgagggcaagacgcttcccggcatcgaggtactgagccgtgagcagccaaccggaggagttttgtga

SEQ ID NO: 212 - DNA, 486 bp, Mycobacterium Tuberculosis
gtggtcggatacgctgaaccggtgctcattgaacggcaaagcgtcgtcgccgcacctgccgagcaggtgtggcaacgggtcgtcaccccggagggcatcaacgatgagttgcgcccctggatgacgatgtcggtgcctcgcggcgcgaaagggatgaccgtcgacacggtgccgatcggcgcgccgatcggacgtgcctggctgcgactgttcggtgtgttgccattcgactatgaccggctcagcatcgccgagctcgagccgggacggcggtttcgcgaggattcgacgatgctgagcatgcggcaatggcagcacgaacgcaccgtgacgcccgagggtgacacgaaaacgattgtccgcgaccgcatcacgttccagacgcgtgccggactcaggtttgccgcgccgctcatcgcggcagggttgcgcgcgctcttcggtcatcggcaccggcggttgcagcgacacttcgctcagggctag

SEQ ID NO: 213 - DNA, 1122 bp, Mycobacterium Tuberculosis
atgaccgctcagaaccccaacctggccgcattgagcgccgcgggggtatcggtgtggctggatgacctgtcgcgggaccggctgcgctcgggcaatctgcaggagctgatcgacaccaagagcgtcgtcggggtgaccaccaacccgtcgatctttcagaaggcgctgtcggagggccacacctacgacgcccagatcgccgagctggccgcgcgcggcgccgacgtggatgccaccatccgcaccgtcaccactgacgacgtgcgcagcgcgtgcgacgtgctggtcccccagtgggaggactccgacggggtcgacggccgggtgtcgatcgaggtcgacccgcggctggcacacgaaaccgaaaaaacgatccaacaggcaatcgagctgtggaagatcgtcgaccggccgaaccttttcatcaagatcccggccactaaggccggtctgcccgccatcagtgccgttctggcggaagggatttcggtcaacgttacgctgatcttctccgtgcagcggtaccgcgaggtgatggacgcctacctgaccgggatggaaaaggcccggcaagccggacacagcctgtccaagatccattcggtggcatcgtttttcgtctcccgggtggacaccgaaatcgacaagcggctggacagaatcggctcgcggcaagcgctcgaactgcgcggccaggccggtgtcgccaatgcccgcctggcctatgccacctaccgggaggtcttcgaagacagcgatcgttatcggtccctcaaggtcgacggcgcccgggtccagcgcccgttgtgggcttccaccggcgtgaagaaccccgattactcggacaccctctacgtcaccgagttggtcgccccacacaccgtgaacactatgccggaaaagacaattgacgccgtcgctgatcatggcgtgatccaaggcgacacggtcaccggaactgcatccgatgcccaggcggtgttcgaccagctgggggcgatcggcatcgacctcaccgacgtgtttgccgtcctcgaggaggaaggcgtgcggaagttcgaggcctcctggaacgagctactccaggaaacccgggcgcatctcgacaccgctgcccaatga

SEQ ID NO: 214 - DNA, 2103 bp, Mycobacterium Tuberculosis
gtgaccacactcgaagagatctccgcgcttacccgaccgcgccatcccgactactggaccgagatcgattcggctgccgtcgacaccatccgggtattggccgccgatgccgtccaaaaggtcggcaacggtcatcctggaacggcgatgagcctggctccgttggcctacacgctgtttcagcggacaatgcgtcacgatcccagcgacacacactggctgggccgcgatcggttcgttttgtcggccgggcacagcagcctgaccctctacatccagctctacctcggcggcttcggcctggaactgtccgacattgagtcgttgcgcacctggggatccaagacccccggacacccggagttccgccacacccccggcgttgagatcaccaccggcccgctggggcagggactggcgtcggcggtcgggatggcgatggcctcgcgctacgagcgcggcctgttcgacccggacgccgaaccgggcgccagccccttcgaccactacatctatgtcatcgcctccgacggtgacatcgaagaaggggtgacctcggaggcgtcgtcgctggccgcggtccagcaactgggcaacctcatcgtgttctacgaccgcaaccagatctcgatcgaggacgacaccaacatcgcgctgtgtgaggacaccgcggcccgctaccgcgcgtacggctggcacgtgcaagaggttgagggcggtgagaacgtcgtcggcatcgaggaggccatcgccaatgcgcaggcggtcaccgaccggccctcgttcatcgcgctgcgcaccgtcatcggctatccggcgccgaacctgatggacaccggcaaggcgcacggcgcggcgctgggcgacgacgaggtggccgcagtcaagaagatcgtcggcttcgatccggacaagacgttccaggtccgcgaggacgtcctcacccacacccgagggctggtggcccgcggcaaacaggcccacgaacgctggcagctcgaattcgatgcctgggcgcggcgtgaacccgagcgcaaggcgctgctggaccggctgctcgcgcagaagttgcccgacggctgggacgccgacttgccccactgggaaccggggtccaaggcgctggccacccgtgcggcctcgggtgcggtgctgtccgcgctcgggccgaaactgcccgagttgtggggcggttcggccgacctggcgggcagcaacaacacaacgataaagggcgccgactcctttggcccgccctcgatttccaccaaggagtacaccgcgcactggtatggtcgcaccttgcacttcggtgttcgcgagcacgcgatgggtgccatcctgtccggcatcgtgctgcacggacccacccgggcttacggcggcaccttcctgcagttctccgactacatgcgcccggcggtgcggctggcggcgttgatggacatcgacaccatctacgtctggacgcacgactcgatcggcctcggcgaagacgggcccacccatcaaccgatcgagcacctctcggcgctgcgcgcgatcccccggctgtcggtggtgcgcccggcagatgccaacgagacagcctacgcctggcgcacgatcctggcccgccgcaacggcagcgggccggtcgggttgatcctgacccgccagggtgtgccggtgctggacggcaccgacgccgagggggttgcccgcggcggttacgtgctgagtgacgccggtggtctgcaaccgggcgaggaacccgacgtcattctcatcgccaccggctcggaggtgcagctggcggtcgcggcgcagacgttgctggcggacaacgacatcctcgctcgggtggtgtcgatgccgtgcctggagtggttcgaggcccaaccctacgagtaccgcgacgcggtgctgcccccgacggtgtcggcgcgggtggccgtcgaagccggcgtcgcgcaatgctggcaccagctggttggcgacacgggcgagatcgtctcgatcgagcactacggcgaatccgcggaccacaagaccttgttccgcgagtacggcttcactgccgaggccgtggccgccgccgccgaacgagcgctggataactga

SEQ ID NO: 215 - DNA, 3990 bp, Mycobacterium Tuberculosis
atgtcgttggtgatcgtggccccggagacggtggcggccgcagccttagatgtggcgcgcatcgggtcatcgatcggcgcggccaatgcggcggcggcggggtcgaccaccagcgtgctggccgcgggcgccgatgaggtgtcggcggcgatcgcgacgctgtttggcagccatgctcgggagtatcaggcgatcagcacgcaggtggcggcgtttcatgaccgatttgcgcagacgttaagcgccgcggtcggctcgtatgtcagcgcggaggcgaccaacgccgcaccgttggcgacgctggagcacaacgtgctcaatgccctcaatgcgcccacccaggcgttgctgggtcgcccgttgatcggtgatggggcggctggagcacccggcaccgggcaggccggcggggccggcgggatcttgtggggcaacggtggggccggcggctcgggcgcgcccggccaagtcggcggggccggcggggccgccgggttgttcggcaccggcggggccggtggggccggtggggccggcgccgccggtggggccgggggtagcggcggctggctgctgggcaatggtggagtcggcggggccggcgggcagagcctgctgggcggggcaaccggcggggccggcggcaacgccggactgttcggggtcggcggaaccggcgggcccggcgggcccggcgggcccggcggggtcggcggtaccggtggtgccggtggcctgggcgggaccctctacggggccggcgggcacggaggtgccggcgggcccggcccgatcggtggtgtgggtggacacggcggtgtcgggggtgcggccgggctgttgggcgtgggcgggcacggtggtgccggcggacacggcgcggagggtgtggccggcgcagccggtgaggacttgtccccgcacggtacgtccggtggggtcggcggcgacgccggcgatggcggcaccggagggcggggcggctggctggccggcgccggtggggccggcggggccggtggggttggcgggaccggcggggccggcggggccggattttctcgtgccttgattgtcgctggggataacggcggtgaccccggcgccggcggggccggaggcaccggcggagccggctccacgatcggtgcccacggcgcggccggggccagccccaccagcggcggcaacggcggggccggcggcaacggcgcccacttctcatcgggcggcaaagccggcggtaacggcggggccggcggggccggcgggctggtcggcaatggcggcgccggaggtgccggcggcaacggcgcccccggtgccccgccttctggcggcgaccctaacggcggtggcggcggagctggcggcgctggcggtaagggcggcgacggcggagcccaagcaggcgacggcggtgctggcggcgccggcggtaagggcggcaacggcggcaacggcgccaccggcgccaccggccttaacggcctgggggcaggcgcggatggcaccgacggcggcaagggcggcaacggtggagccggcggtggcggtggagccggtgggcaaggcggtaaggcgcttgcagccacccaccaggacggcagcatgggtgccggcggggccggcggaaacggcggcgccggcggcatgggcggtgatggcggcaacggtgccaagggcacgttcgataacggcggcgatggagttggtggcaacggcggcaacggcggtagccgcggcatcggtggtgctggtgggatcggcggcgccggatccaccgcgggtgcagacggtgcccgcggcgccaccccgaccagcggcggcaacggcggcaccggcggcaacggcgcgaacgccaccgtcgccggcggggccggcggggccggcggcaagggcggcaacggcgggcttgttggtaatggcggggccggcggcaaaggcggggacggcatggccggtgtcgccggttcctcgcccaccaccgcgggcgaatccggcacgagcggccagaacggcggggctggcggggcgggcggggccggcggccggggcggagacttcgggggcgacggcgggaccggtggggccggcggcaacggcgccaacggcgccaacgccaccacgccgggcgccaagggcggcgacggcggccacggcgggcccggcgcgcaaggcggtaacggcggccaaggcgggcccggcggtttggcggggaacctctttggccagaacggaatccagggtgtcggcgggtccggcggcaaagggggggccggcgggctcgccggtgacggcggcaacggcgccaacggcaacttcgccttcggcgatggtaacggcggtcacggcggtaacggcggtaaccccggcgccggcgggcagggcggtagcggtggcgccggctctaccccaggcgccaagggcgcccacggcttcactccaaccagcggcggcgacggcggcgacggcggcaacggcggcaactcccaagtggtcggcggcaacggcggcgacggcggcaatggcggcaacggcggcagcgccggcacgggcggcaacggcggccgcggcggcgacggcgcgtttggtggcatgagtgccaacgccaccaaccctggtgaaaacgggccaaacggtaaccccggcggcaacggtggcgccggcggggccggcggggccggcctgaacggcggtaacggtggcgccggcggcaacggcggcctcggcggattcggcggcaacggcgccgccggtgccaacggcgtggccgtgggtgcgcccggacaacccggcggtgccggcgggcacggcggcgccggcggcaacggcggggccggcggcaacggcggtcaaggcgtagtcagcgacggcgcgggcggtgccggtggggccggcggcgacggcggtgctcccggtgacggggccaacggcggcaacggccagggagcaggggccttcgccggcggcggcggcgggcgaggcggcgacggcggcaacgccggcaacgccggtgccggcggccccggcggcaccggctccaccgcaggcaaggcggggccggccggcagcatcctgcacgacggcggcaacggcggtcacggcggccacggcgctgccagcggcggaaacggcggccccggcggccacgggggtaacggcggtaacggcggcaccggcgccaacggcggcaacggtggcatcggcgggactggcggcgccggcagcaccggcgccaagggcgtcctcggcaccaacgagggcgatggcggtgacggcggcagaggcggcaacggcggcagaggcggcaacggcggccaaggcctcaccggagccggcggcaacggtgggaccggcgggacacccggcaacggcggcaacggtggcaacggcgccagtggcgaccttgtcacctcacctggtgacggcggcggcgggggccgcggaggcgatgcaggacgcggaggcgatgcaggacttggcggttccagcggcccaggtggcacccccggcgactggggcaccggcggcaccggcggcaccggcggcaccggcggccagggtgccaacggcggcctcaccggcggcagaggcggcactggcggcaacggcggcaacggtaacaccggcggcaccggcggcgctggcggcaccggcggcaccggccacaacggctctcagcctgggatgggtggcaacggaggtgcgggcggctttggcggcaatggttttgccggcgtcggtggccggggcgggatgggtggctccgggggcaccggcggcaccggcgacgcggggccctttggaacaggcaccggtgggaccggtggccacggggggcagggcggtggcggcggcttcagcatcctccttggtctcggcggtctcggcggcctcggtagcccggggtccatcgccacaggtaccgccggcggcgccggtggcggcggtggcttcggcgggctcggcggcggcgaattcgtgtag

SEQ ID NO: 216 - DNA, 2226 bp, Mycobacterium Tuberculosis
atgtcgttggtgatcgtaaccccggagacggtggccgcggcggcctcggatgtggcgcgcatcgggtcatcgatcggtgtagccaacagcgcggcggcggggtcaaccaccagcgtgctggccgcgggcgccgatgaggtgtcggcggcgatcgcgacgctgtttggcagccatgctcgggagtatcaggcgatcagcacgcaggtggcagcgtttcatgaccgatttgcgcagacgttaagcgccgcggtcggctcgtatgtcagcgcggaggcgaccaacgccgcaccgttggcgacgctggagcacaacgtgctcaatgccctcaatgcgcccacccaggcgttgctgggtcgcccgttgatcggtgatggggcggctggagcacccggcaccgggcaggccggcggggccggcgggatcttgtggggcaacggtggggccggcggctcgggcgcgcccggccaagtcggcggggccggcggggccgccgggttgttcggcaccggcggggccggtggggccggtggggccggcgccgccggtggggccgggggtagcggcggctggctgctgggcaatggtggagtcggcggggccggcgggcagagcctgctgggcggggcaaccggcggggccggcggcaacgccggactgttcggggtcggcggaaccggcgggcccggcgggcccggcgggcccggcggggtcggcggtaccggtggtgccggtggcctgggcgggaccctctacggggccggcgggcacggaggtgccggcgggcccggcccgatcggtggtgtgggtggacacggcggtgtcgggggtgcggccgggctgttgggcgtgggcgggcacggtggtgccggcggacacggcgcggagggtgtggccggcgcagccggtgaggacttgtccccgcacggtacgtccggtggggtcggcggcgacgccggcgatggcggcaccggagggcggggcggctggctggccggcgccggtggggccggcggggccggtggggttggcgggaccggcggggccggcggggccggattttctcgtgccttgattgtcgctggggataacggcggtgatggtggtaacggcgggatgggcggggctggcggggctggcggccccggcggggccggcggcctgatcagcctgctgggcggccaaggcgccggcggggccggcgggaccggcggcgctggtggcgtcggcggtgaccgcggagccggcggccccggcaaccaggccttcaacgcaggtgccggcggggccggcggccatggcggtgaccccggcgccggcggggccggaggcaccggcggagccggctccatcaccggcgctcagggcgccatcggcgccacccccaccagcggcggcaacggcggggccggcggcaacggcgccaacgccaccaccgcgggcaccaacggcgccaacggcggacccggcggccatggcgggctggtcggcaacggcggcgccggcggcaacggcgccaacggcgccgcagggacgaacgcgagcgattcgggcgcagtcggtggcaaaggcaatagcggcggcaacggcggccagggcggcgccggcggcgacggcggaactctcgccggcaatggcggggccggtgggactggcggccgcggcgcagacggcgggctcggtggtagtggtgccgagggtgccaatgccaccaccgcgggcgagcgtggccaggacggtggtaaaggcggcaacggtggggtcggcgggaccggcggcaacgccgtcgcacccggtgccaacggcggccatggcggcaacggcggcaatcctggcttcagcggcgctggcgggctcggggggctcagcggtgacggcgtgacccgcgccgcgcagggtgcgacccccgactttgcagacaccgggggcaaaggcggcaacggcggtaacggcgccaacgccgttgcacccggcggcaccggcgccagtggcggagccggcgggaacgctggggctggcggcaagggcggggaaaacatcatcggcgatggcggcggcggaaacggcggggccggcggcaagggcggcgccggcaccctgctaggtctcacggtatttggcgacaatggcggcgccggcgtcctcggcgactcgacggacccagatggcagcggcggtgctggtggcgcgggcggcgccggtggcgccggtggcgatccaaccatctga

SEQ ID NO: 217 - DNA, 192 bp, Mycobacterium Tuberculosis
atgcggaagtcaaagaagacgcgcgatcagctgctgcgcgagttgcgcaacgcctacgagggcggggccagtatccgcaacctggcggccaccaccggccggtcgtacggatctattcacagcatgctgcgcgagtcaggcaccacgatgcgcggccgcggcggccccaatcgccgttcccggccgcgttga

SEQ ID NO: 218 - DNA, 561 bp, Mycobacterium Tuberculosis
atgaccgggccatattttcctcagacgatcccgttcctgcccagctacattccgcaagacgtcgacatgaccgcggtcaaagcggaggtcgccgcactcggtgtcagcgctccaccggcggccacgccgggcctgctcgaggtggtccagcacgctcgcgacgagggcatcgatctcaagatcgtgctgctcgaccacaacccgcccaatgacacaccgctgcgtgacatcgcgaccgttgtcggggccgactactcggatgccaccgtcttggtgctcagcccgaactatgtcggcagttacagcacgcaatacccccgggtcacgctcgaggccggggaagaccattccaagaccggcaatccggtgcagtccgcgcagaactttgtccatgagctgagcacacccgagtttccctggagcgcgctgaccattgttttgctgatcggtgtgctggcagcggctgtgggtgctcggttgatgcaactgcgcgggaggaggtcagcaacgtcgactgacgccgccccaggggcgggggacgatctcaatcaaggcgtctag

SEQ ID NO: 219 - DNA, 744 bp, Mycobacterium Tuberculosis
gtgactgccacagccactgaaggggccaaacccccattcgtatcccgttcagtcctggttaccggaggaaaccgggggatcgggctggcgatcgcacagcggctggctgccgacggccacaaggtggccgtcacccaccgtggatccggagcgccaaaggggctgtttggcgtcgaatgtgacgtcaccgacagcgacgccgtcgatcgcgccttcacggcggtagaagagcaccagggtccggtcgaggtgctggtgtccaacgccggcctatccgcggacgcattcctcatgcggatgaccgaggaaaagttcgagaaggtcatcaacgccaacctcaccggggcgttccgggtggctcaacgggcatcgcgcagcatgcagcgcaacaaattcggtcgaatgatattcataggttcggtctccggcagctggggcatcggcaaccaggccaactacgcagcctccaaggccggagtgattggcatggcccgctcgatcgcccgcgagctgtcgaaggcaaacgtgaccgcgaatgtggtggccccgggctacatcgacaccgatatgacccgcgcgctggatgagcggattcagcagggggcgctgcaatttatcccagcgaagcgggtcggcacccccgccgaggtcgccggggtggtcagcttcctggcttccgaggatgcgagctatatctccggtgcggtcatcccggtcgacggcggcatgggtatgggccactga

SEQ ID NO: 220 - DNA, 6327 bp, Mycobacterium Tuberculosis
gtgggtaaggagagaacaaagaccgtggataggacacgtgttacgccggtagctgtcattggtatggggtgccggctgccggggggcatcgactcacccgatcggttgtgggaggcgttgctgcggggcgacgatctggtcaccgagatccccgccgaccgctgggacatcgacgagtactacgaccccgaacccggcgtgcccggacgcaccgactgcaaatggggcgcgtacctcgataacgtcggcgactttgatcccgagttcttcgggatcggggagaaagaagcgatagcgatcgatccgcagcaccgcttgttgctggaaacctcctgggaagccatggagcacggcggcctaacaccgaaccagatggcctcgcggacaggggttttcgtggggttggttcataccgactacatattggtacacgccgacaaccagactttcgaagggccgtacggcaacacgggcaccaatgcctgcttcgcatccgggcgggtggcgtacgccatgggcttgcagggtcccgcgatcacggtagataccgcatgctcgtctggcctcaccgctatccacctggcttgtcgtagcctgcacgacggcgaaagcgacattgcgctagccggcggtgtctacgtgatgctcgaaccgcggcggttcgcctcgggctcggcgttgggcatgttgtctgcgaccgggcgctgtcatgcgttcgacgtttccgcggacggtttcgtctccggtgagggttgtgtcatgttggcgctcaagcggttgccggatgcgctggccgatggggaccggatcctggccgtaattcgtggcacggccgccaaccaagacggccacaccgtcaatatcgcgacaccatcacggtccgcgcaggtcgcggcgtatcgggaggcgttggatgtggccggtgtggacccggctacggtgggcatggtcgaggcgcacggcccgggcaccccggtgggtgaccccatcgaatacgccagcctggccgaggtatacggcaacgacggcccctgcgcgctggcatcggtgaagaccaatttcggccacacccagtcggccgctggagcgctgggactgatgaaggcggtcctggccctccaacacggcgtggtcccacagaatctgcacttcacggccctgcctgacaagcttgccgcaatcgaaaccaacctgtttgtgccgcaagagattacgccgtggcccggcgccgatcaagaaacgccccggcgcgcggcggtgtcgtcgtatggcatgacgggcaccaatgtgcacgccattgtcgagcaggcaccggtgccagcccccgaatccggtgcaccaggcgacaccccggccacacccggtatcgacggcgcgctgctgttcgcgctgtcggccagctcgcaggacgcgctgcggcagaccgccgcgcggctggccgattgggtcgacgcccaaggacccgagctggcgccggcggatctggcctacaccctggcccgccggcgcggacaccggccggtgcgcaccgccgtactggccgccaccaccgcggagctgaccgaggcgctgcgggaagtcgccaccggcgaacccccctacccacccgcggtcggccaagacgaccgcggaccggtctgggtgttctccgggcaaggctcgcaatgggcgggcatgggcgccgacctgctggccaccgaaccggtattcgccgccaccatcgccgcgatcgaaccactgatcgccgcggaatccggcttctcggtgaccgaagccatgaccgcccccgaggtcgtgaccggcatcgaccgggtgcaaccgaccctgtttgccatgcaggtcgcgctggcggccacaatgaagtcctacggcgtagcgcccggcgcggtcatcggccactcgctgggcgagtccgcggccgcggtggtcgccggcgcgctctgcctcgaagacggagtgcgcgtcatctgccggcggtcggcgctgatgacccgtatcgccggcgccggcgccatggcatcggtggaactgcctgctcaacaagtgctttcggagttgatggcgcgcggcgtcaacgacgccgtggtcgcggtggtggcctccccgcagtccaccgtgatcggcggggccacccagacggtacgcgacctggtggccgcctgggagcaacgcgacgtgctggcccgtgaggtggccgtcgacgtagcatcgcactccccgcaggtcgacccgatcctcgacgaactggccgaagcgctcgccgaaatcagcccgctgcaaccggaaatcccctactactcggcgacctcgttcgacccgcgcgaggagccctactgcgacgcctactactgggtggacaacctgcgccacaccgtacgcttcgccgcggcggtgcaagccgccctcgaagacggctaccgggtcttcaccgagctgaccccccaccccctgctgacccacgcggtcgaccagaccgcccgcagcctcgacatgtccgcggctgcgctggccggcatgcgccgcgaacaaccactgccccacgggctgcgcgcactggccggcgacctctacgccgccggcgccgccgtcgacttcgccgtgctctaccccaccggccgactgatcaacgcaccactgcccacatggaaccaccgtcgtctgctgctcgacgacacgacccgtcgcatcgcccacgccaataccgtcgccgtacacccattgctgggctcccacgtgcgcctgcccgaggagccggaacgccacgtctggcagggcgaggtcggcaccgtgacacaaccctggctggccgatcaccaaatccacggcgcggccgcccttccgggagccgcctactgcgagatggcgttggccgcagcccgcgccgtcctcggcgaagcctccgaagtccgcgacatccgattcgagcagatgttgctgctcgacgacgaaacccccatcggcgtcaccgccacggtagaagcccccggcgttgtcccactcacagtagagaccagccatgatggtaggtacacacggcaactcgccgcggttctgcacgttgtccgggaagccgacgacgccccggaccagccaccccagaaaaacatcgccgaactgctggccagccatccccacaaggtggacggcgccgaggttcggcaatggctggacaagcgtggtcatcgcttagggccggcttttgcgggtctggttgacgcgtacatcgccgaaggggccggcgacacggtgctggccgaggtcaacctaccgggcccgcttcgctcgcaggtcaaagcttacggcgtgcatcccgtgctgctggatgcgtgcttccagtcggtggcggctcatcccgccgtccagggtatggccgacggtggtttgttgctgccgttgggtgtgcggcggttgcggtcctatgggtcggcccgtcatgcccggtactgctgcacgacggtgaccgcgtgcggtgtgggcgtggaagccgacctggacgtgttggacgagcacggcgcggtggtgttggcggtgcgtgggctgcagttgggtaccggcgcgtcgcaggccagcgaacgtgcccgggttttgggtgagcggctgctgagcatcgaatggcacgaacgtgagctgcccgaaaacagccacgccgaacccggcgcctggctgctgatcagcacgtgtgacgctacggatttggtggccgcacagttgaccgacgcgctgaaggtgcacgacgcgcagtgcacaacgatgtcctggccgcagcgcgccgaccacgcagcccaggccgcgcggctgcgcgaccagctcggcaccggcgggttcaccggcgtattcgtgttgaccgcgccgcagaccggcgaccccgacgcggaatcccccgtgcgcggcggcgagcttgtcaaacatgtggtgcgtatcgcccgcgagattccagagatcacggcccaagagccgcggttgtatgtgctgacccacaatgctcaggcggtgttgtctggtgaccgacccaatcttgagcagggtgggatgcgggggttgttgcgggtgattggtgctgagcatccgcatttgaaggccagctatgtcgatgtggatgagcagaccggcgcggagtcggtggcgcgtcagctgctggcggccagcggcgaggatgagaccgcctggcgcaacgaccagtggtacaccgcccggttgtgcccagccccgctgcgccccgaggagcggcaaaccaccgtcgtcgaccacgccgaggccggcatgcgcctacagatccgtactcccggtgacctgcaaaccttggagttcgccgcgttcgaccgggtcccgccgggcccgggagagatcgaggtcgccgtcaccgcgtccagcatcaacttcgccgacgtgctggtcaccttcggccgctaccaaaccctcgacgggcgacagccgcagctgggcaccgatttcgccggggtggtgagcgcggtcgggcccggggtcagcgaactcaaggtcggtgaccgggtcggcggcatgtcacccaacggctgctgggccacgttcgtcacctgcgacgcccgcctggccaccagactgcccgaggggctgaccgacgcccaagccgcggcagtgaccaccgccagcgccaccgcgtggtacgggctgcaggacctggcgcggatcaaggccggcgacaaggtgctcatccactccgccaccggcggagtgggccaggccgcaatcgcgatcgcgcgtgcggccggagcccagatctacgccaccgcaggcaacgaaaagcgtcgagacctgctgcgcgacatgggcatcgaacacgtctatgactcgcgcagcgtcgagttcgccgagcagatccgccgcgacaccgccggctacggcgtggacatcgtgctcaactccgtgaccggtgccgcacagttggccggcctcaaactactggccctgggcggccgcttcatcgaaatcggcaaacgcgacatctactccaatacccgactggaactcttgccattccggcgcaatctggcgttctacggtctagacctggggttgatgtcggtgagccatccggctgcggtccgcgaactgttgagcacggtgtatcggttgaccgtcgagggtgtgctgccgatgccgcagagcacccattacccgctggccgaggcggccaccgcgatccgggtgatgggcgcggccgagcacaccggcaagctcatcctcgacgtcccccacgccgggcgcagcagcgtggtgcttccccccgaacaggctcgggttttccgttcagacgggtcctacatcatcaccggtggcctgggtgggctgggcttattcctggccgagaagatggccaacgccggggccggccgcatcgtgctcagctcgcgctcacagcccagccaaaaggcgttggagaccatcgaactcgtccgcgcgatcgggtctgacgtagtggtggagtgcggcgatatcgcccagccggacaccgccgaccggttggtcacggcggccaccgcgacgggtttgccgctgcgcggcgtgctgcacgcggccgcggtggtcgaggacgccaccttggccaacatcaccgacgaactcatcgaacgcgactgggcgcccaaggcatatggcgcctggcaactgcaccgggccaccgcggaccagccgctggactggttctgctcattctcctcagcggccgccctggtgggctcgccgggtcagggcgcctacgccgcggccaacagctggctggacaccttcacccactggcggcgagcccaagacctaccagccacctccatcgcctggggcgcctggggccagatcggccgcgcgatcgcctttgccgaacaaaccggcgacgccatcgcccccgaggaaggcgcctacgccttcgagaccctgctgcgccacaaccgcgcctacagcggctacgccccggtgatcggatcaccctggctgacagccttcgcccagcacagcccattcgcggagaagttccaatccctggggcaaaaccgttcaggcacaagcaaattccttgccgagctggtggacctgccccgcgaggaatggccagaccggctgcggcggctactctccaagcaggtcggcctaatcctacgccgcaccatcgacaccgaccggctgctcagcgagtacggcctggactcactgagcagccaggaactgcgtgcgcgggtggaagccgaaaccgggatccgcatttccgccaccgaaatcaacaccaccgttcgtggcctggcggatctgatgtgcgacaagttggcggccgacagggacgcgccggcacccgcctga

SEQ ID NO: 221 - DNA, 1128 bp, Mycobacterium Tuberculosis
atgcggaccagagtcgccgagctgctcggtgctgagtttccaatatgcgcgttcagccactgccgggatgtggtggcggcggtgtccaatgcgggcgggttcgggatcctcggtgccgtcgcacatagccccaaacggctggagagcgagctgacctggatcgaggagcacacgggtggcaagccgtacggagtcgacgtgctgctgccgcccaaatacatcggcgccgagcaaggcggtatcgatgcccagcaggcccgggagctcatacccgaagggcatcgcaccttcgtcgacgacttgctggttcgctatggcatccccgcggtcaccgaccggcagcgttcgtcctcggccggtgggctgcacatctcgcccaagggttatcagccgttgctggatgtggccttcgcccatgacatccggttgatcgccagcgcgctcgggccgccgccaccggatctcgtggagcgcgcccacaaccatgacgtgctggttgccgccctagccggcacggcgcagcacgcgcggcgacacgcggctgcgggtgttgacctgatcgtcgcgcagggcaccgaggccggaggccacaccggcgaggtggcgaccatggttctggttcccgaagtcgtcgatgcggtgtcgccaacgccggtgctggccgcgggcgggatcgcccgtggccgccagatcgctgcggcgttggccctgggggcggaaggcgtctggtgcgggtcggtctggttgaccaccgaagaagccgaaacgcccccggtggtcaaggacaagtttctggccgcaacatcctcggacacggtgcggtcccggtcgctaaccggcaagccggcgcgcatgctgcgcacggcctggaccgacgaatgggatcggcctgacagccccgacccgcttggcatgccgctgcagagcgcgctggtcagcgacccgcagttgcgcatcaaccaggccgccggccagcccggggccaaggctcgtgagctggcgacctacttcgtcggacaggtcgtcggctcactcgaccgggtgcggtcggcccgctcggtggtgcttgacatggtcgaggagttcatcgacaccgtcgggcaactgcaggggttggtgcaaaggtga

SEQ ID NO: 222 - DNA, 3126 bp, Mycobacterium Tuberculosis
gtgaccgataacgcatatccaaagctggccggcggggcacccgacctcccggcactcgaactcgaggtcctcgactactggtcccgtgacgacaccttccgggccagcattgctcgccgcgatggcgcccccgagtatgtgttctatgacgggccgccgtttgccaacggtctgccgcattatgggcacctgctcaccggctacgtcaaagacatcgtgccgcgatatcgcactatgcgcggttacaaggtggagcgtcgcttcggctgggacactcacgggctgcccgccgaactcgaagtcgagcgccagcttggcatcactgacaaatcccagatcgaggccatgggtatcgccgccttcaacgatgcctgccgcgcatccgtgttgcgctacaccgacgagtggcaggcgtatgtaactcggcaagctcgctgggtcgacttcgacaacgattacaagacgctcgatctggcttacatggagtcggtgatttgggccttcaaacagttgtgggacaagggcctggcctacgagggctaccgggtgctgccgtactgctggcgcgacgaaactccgctgtcgaatcacgaactgcggatggacgacgacgtctaccaaagccgccaagatcccgcggtaacggtgggcttcaaggtggtgggtggccaaccagacaacgggctagacggtgcctacttgctggtgtggacgacgactccgtggaccctgccgtcgaacctcgcagttgcggtaagcccggacatcacctacgtacaggtccaggcgggcgatcgccgtttcgtactggccgaggcacggctggccgcttacgcccgcgaactcggtgaagagcccgtggtgctcggcacctatcgcggcgccgaactgctgggcacccgctacctgccgccgtttgcctatttcatggactggcccaacgcttttcaggtgctagcaggcgactttgtaacgaccgacgatggcaccggcatcgtgcatatggcaccggcctatggtgaggacgacatggtggtcgcggaggcggtcggtatcgcgccggtgactccggtcgactccaagggacgcttcgacgtcaccgttgccgattaccaagggcagcatgtctttgacgccaacgcgcagatcgtccgggacctgaagacccaaagcggcccggctgcggtgaatggcccagtgttgattcgtcacgaaacctacgagcacccttacccacactgctggcgatgccgtaacccgctgatctaccggtcggtgtcgtcgtggttcgtcagggtgacggacttccgagaccgcatggtggagctaaaccagcagatcacgtggtatcccgaacacgtcaaggacggccagttcggcaagtggctgcagggcgcccgcgattggtcgatctcccggaatcgctactggggtaccccgattccggtatggaagtccgacgacccggcctacccgcgcatcgatgtctacggcagcctcgacgagctggagcgcgacttcggcgtacgcccggccaatttgcaccggccctacatcgacgagctcacccgtcccaacccagacgatccgactggccgtagcacgatgcgacgcattcccgatgtgctcgacgtgtggttcgactcgggatccatgccgtatgcccaggtgcactacccgttcgagaacctggattggttccagggacactaccccggcgacttcatcgtcgagtacatcgggcagacccgtggctggttttacacactgcatgtgttggcgaccgcgctctttgaccggccggcattcaaaacctgtgtggcgcatgggattgtccttggtttcgatggccagaagatgagcaagtcgctgcgcaactatccagacgtaacagaggtgttcgatcgcgacggctccgacgccatgcggtggttcctgatggcatcgccgattctgcgcggcggcaacctgatcgtcactgagcaaggaattcgcgacggtgtgcgacaagtcctgctgcccctgtggaacacctacagcttcctggcgctgtatgcaccgaaagtcggtacctggcgcgtcgattcggtgcacgtgctggatcgctatatcctggccaagctggcggtgctgcgcgacgacctcagcgagtcgatggaagtttacgatattcccggtgcctgtgaacatttgcgtcagttcactgaggcgttgactaattggtatgtgcgacggtcgcgttcgcggttctgggcagaagacgccgatgccatcgacacgctacacaccgtgttggaggtgaccacgaggctggccgccccgctgcttccgctgatcaccgagataatctggcgtggtctgacacgcgagcgatcggtgcacctgacggactggccagcgcccgacctgctgccgtcggatgccgacctggtcgccgcgatggaccaggtccgcgacgtgtgctcggcggcatcctcgctgcgcaaggccaagaagctacgggtgcgcctgccgctaccgaaactcattgtggcagttgagaatccgcaacttctgaggccgttcgtcgacctcattggcgacgagcttaacgtgaagcaggtcgaactgaccgatgccatcgacacctatggccgattcgagctcacggtcaacgcccgggtagccggaccacggctgggcaaagatgtgcaggccgccatcaaggcggtcaaggccggcgacggcgtcataaacccggacggcaccttgttggcgggccccgcggtgctgacgcccgacgagtacaactcccggctggtggccgccgacccggagtccaccgcggcgttgcccgacggcgccgggctggtcgttctggatggcaccgtcactgccgaactcgaagccgagggctgggccaaagatcgcatccgcgaactgcaagagctgcgtaagtcgaccgggctggacgtttccgaccgcatccgggtggtgatgtcggtgcctgcggaacgcgaagactgggcgcgcacccatcgcgacctcattgccggagaaatcttggctaccgacttcgaattcgccgacctcgccgatggtgtggccatcggcgacggcgtgcgggtaagcatcgaaaagacctga

SEQ ID NO: 223 - DNA, 609 bp, Mycobacterium Tuberculosis
atggtaggcgctgtgacccagatagcggatcggcctacagacccctcgccctggtcgccgcgagagaccgagttactggcggtgacactacggctgctgcaggagcacggttatgaccggctaacagtggatgccgttgcggcgagcgcccgcgccagcaaggcaacggtctaccggcgctggccgtcgaaagccgaattggtgctggccgcgttcatcgagggcatccgccaggtcgcggtcccgcccaataccggcaacctgcgcgacgacttgctgcgactgggggagctgatctgtcgggaggtgggccaacacgccagcaccatccgcgcggtgctcgtcgaagtgtcgcgcaatcctgccctcaacgacgttttgcagcatcagttcgtcgaccaccgtaaggccctgatccagtacatcttgcagcaggccgtcgaccgcggtgagatctccagcgcggccatcagcgatgaactctgggacctgctacccggctacctcatcttccggtccatcatccccaaccggccgcccacccaggacacggtgcaagccctcgtcgacgacgtgatactccccagcctcacccgatccaccggttga

SEQ ID NO: 224 - DNA, 2166 bp, Mycobacterium Tuberculosis
atgtcgtcgaacaacgccggggagtccgacgggaccgggcccgctctacccacggtgtggccgggcaacgcctatccgcttggagccacctacgacggcgccgggaccaacttttcgttgttctccgagatcgccgagaaggtcgagctatgtctgatcgacgaggacggcgtcgagtcgcggatcccgcttgacgaggtggacgggtacgtctggcatgcctatctgccgaacatcacccccggccagcgctacgggtttcgtgtgcacgggccgttcgacccggcggccggccatcggtgtgaccccagcaagctgctgctcgacccgtatgggaagtcgttccacggcgatttcaccttcgggcaggcgctgtattcctatgacgtcaacgccgtcgacccggacagcactcccccgatggtcgactcgctgggccacactatgaccagcgtcgtgatcaatccgttcttcgactgggcatacgaccggtcgccgcgcaccccgtaccacgagaccgtaatctacgaagcgcatgtcaaaggcatgacacagacccatcccagtatcccgcccgaactccggggcacctacgccggcctggcccacccggtgatcatcgaccacctcaacgagctcaacgtcaccgccgttgagttgatgccggtgcaccagttcctacacgactcccggctgctggacctcggcttgcgaaactactggggttacaacaccttcggattcttcgccccgcaccatcaatacgcgtcgacccggcaagccggcagcgcggtagccgagttcaaaaccatggtgcgcagcctgcacgaagccggcatcgaggtcatcctcgacgtcgtctacaaccacaccgctgaaggcaaccacttgggtccgacgatcaactttcgcggaatcgacaacaccgcctactaccgactgatggaccacgacttgaggttctacaaggacttcaccggtaccggcaacagcctcaatgcccgccacccacacaccctgcagctgatcatggattcgctgcgctactgggtgatcgaaatgcacgtcgacgggttccggttcgacctggcgtccacgctggcccgcgagctgcacgacgtcgaccggctgtcggcattcttcgatctggtgcaacaagatccggtggtcagtcaggtcaagctgatcgccgagccatgggatgtcggcgaaggtggctaccaggttggcaacttcccaggactgtggacggaatggaacggcaagtaccgcgacaccgtgcgcgactactggcgaggcgagccggccaccctaggcgaattcgcctcccggctgaccgggtcgtcggacctctacgaagcaaccggccgccggcccagtgccagtatcaatttcgtcaccgcccacgacgggttcacactcaacgacctggtctcgtacaacgacaagcacaacgaggccaatggcgagaacaaccgcgacggggaaagctacaaccgatcgtggaactgcggtgtcgagggccccaccgatgaccccgacatcttggcgctgcgtgcccgccagatgcgcaacatgtgggccacgcttatggtcagccagggcacgccgatgatcgcccacggcgacgagattgggcgcacccaatacggcaacaacaacgtctactgccaggactccgaattatcttggatggattggtcattggtggacaagaatgccgatctgctagctttcgcacgcaaggcgacgaccttgcgcaagaaccacaaggtgtttcgccgacgccggttctttgagggtgaaccgatccgcagtggcgacgaagtccgcgatatcgcctggttgacaccgagcggtcgggagatgacgcacgaggattggggcagaggcttcgacaggtgtgttgcggtgtttctcaacggtgaagccattaccgcaccggacgcccgtggtgagcgagtagtcgacgattcattcctgttgtgcttcaacgcccatgaccacgacgtggagttcgtgatgccgcatgacggctatgcgcagcagtggaccggagagctggataccaacgatcccgtcggtgacatcgacctgacggtaaccgccactgacacgttttcggtacctgcgcgctcgctgctggtcctgcgtaagacgttgtga

SEQ ID NO: 225 - DNA, 105 bp, Mycobacterium Tuberculosis
gtggaatgttcttcagcagtccacggccaaccccgcaccaacaccttccaccaccacgagaagctgctacgccacaacgacgaggacaaccacgacgatccgtga

SEQ ID NO: 226 - DNA, 1410 bp, Mycobacterium Tuberculosis
gtgagatacactacacctgtgcgtgctgctgtctacctccgaatctcagaagaccgctccggcgaacagctcggcgtggcccgccaacgcgaggactgcctaaagctgtgcgggcagcgaaaatgggtgcccgtcgagtacctcgacaacgacgtcagcgcatcaaccggcaagcgccgccccgcctacgagcagatgttggccgacatcaccgccggcaagatcgccgccgtggtggcctgggacctggaccggctccatcgccgtcccatcgagctggaagccttcatgtcattagccgacgagaagcggctggccctggccaccgtcgccggcgacgttgacctggcgacaccccagggccggctagtcgcccgcctgaaggggtcggtggccgctcacgaaaccgagcacaagaaggcacgacagcgccgcgccgcccgccagaaagctgaacgcggccaccccaactggtcgaaagccttcggctacctgcccggccccaacggtcccgaacccgacccccggacagcgccgctggtcaaacaggcctacgccgacatcctcgccggggcgtccctgggcgacgtgtgccgccagtggaacgacgccggggcgttcaccatcaccggccgcccgtggacgactacaacgctgtcgaaattcttgcgcaaaccccgcaacgccggactacgcgcatataagggtgcccgctacggcccggtggaccgcgacgcgattgtcggcaaggcccagtggtcgccgctggtggacgaggcgacgttctgggccgcccaggccgtgctggacgcccccggccgcgcccccggccgcaaaagcgtgcgccgccacctgctgaccgggctggcaggctgcggcaaatgcggcaaccacctggccggcagctaccgcaccgacggccaggtcgtctacgtgtgcaaggcgtgccacggggtggccatcctggccgacaacatcgaaccgatcctgtatcacatcgtggccgagcggctggccatgcccgacgccgttgacttgttgcgccgggagattcacgacgccgccgaagccgaaaccatccgcctggaactggaaaccctctacggggagctggacaggctcgccgtcgaacgcgccgaagggctactgaccgcgcgccaggtgaagatcagcaccgacatcgtcaacgccaagataacgaaacttcaggcccgccaacaggatcaggaacggctccgagtgttcgacgggataccgttgggaacaccgcaagtcgccgggatgatagccgagctgtcgccggaccggttccgcgccgtcctcgacgtcctcgctgaagtcgttgtccagccggtcggcaagagcggcaggatattcaatcccgaacgggtgcaggtgaattggcgatga

SEQ ID NO: 227 - DNA, 1143 bp, Mycobacterium Tuberculosis
atgaccaggtccggacacccggttacattggacgacttgccgctgcgcgccgacttgcgtggtaaagcaccatacggtgcaccgcaattagctgttccggtacggctgaacaccaacgagaacccgcacccgcctacccgggcgctggttgacgacgtggtgcgatcggtgcgggaagcggccatcgacttgcaccgctaccccgaccgcgacgccgtggctctgcgtgctgacttggccggctatctcaccgcgcagaccggaatccagcttggtgtcgaaaacatatgggctgccaacggttccaatgagattctgcagcaactgttacaggcgtttggcggtccggggcgtagcgcgatcggtttcgtaccgtcctattcgatgcacccgatcatctccgacggcacccacacggaatggatcgaggcgtcccgcgccaatgacttcggtctcgacgtggacgtcgccgtcgcggctgtggtcgatcgcaaacccgatgtggtgttcattgctagccctaacaacccgtccggacaaagtgtttcgttacctgacctgtgtaagctgctggacgttgcgcccggaattgcgatcgtcgacgaggcctacggcgagttctcctcgcagcccagcgcggtgtcgctggtcgaggagtatccgagcaagctcgtcgtcacgcgcaccatgagcaaggcattcgctttcgccggcggcaggctcggatacctgatcgctacgcccgcggtgatcgacgcaatgctgctggtgcggttgccgtatcacctgtcgtcggtcactcaagccgcggcccgggccgcgctgcggcactccgacgacaccttgagcagtgtcgccgcactgatcgccgaacgcgaacgcgtaacaacctcattgaacgacatgggttttcgagtcatcccaagcgatgccaacttcgtgttgttcggcgagtttgccgatgcgccggccgcctggcggcgctatctggaggccggcattttgatccgcgacgttgggattcccggctatctgcgggccaccaccgggctggctgaggagaacgatgcgttcctgcgggcaagcgcccggatcgccaccgacctggtccccgtcacccgcagtcctgtaggagcgccatga

SEQ ID NO: 228 - DNA, 399 bp, Mycobacterium Tuberculosis
atggaagctagcgggcgtcaacgtcgctacgccgcggccggttcggtcgtgctattggccggcgcgcttggctacatcggacttgtcgacccgcacaactcgaattcgctatatccaccgtgcctattcaagttgcttacgggctggaactgccccgcgtgcgggggtctgcggatgatccacgatctgctacacggtgagctggcggccagcatcaacgacaatgtctttctgcttgtcggcgtcccagtgctggccagttgggtcctgctgcgccgccgccacggcgacttggcgctcccgataccggtgatgattgctgtggcggtcgcggtgatcgcgtggacggtgctgcgcaacctgccaggcttcccgttagtgccgacgatcagcggatag

SEQ ID NO: 229 - DNA, 1731 bp, Mycobacterium Tuberculosis
atgaaccgaccgagtgctgtgagtcgccgccagcgggacctgctggccgcgtctgggctgttgggtccccggttgccccggatcttggcggccgtcgcgctgggcgtgctgtcgctgggcagcgcgctggccctggccggggtgtcggcctggctgatcactcgggcctggcagatgccgcccgtcctggacctgtcggtggcggtcgtggcggtgcgggcgttcgcgatttcgcgcggcgtgctgcactactgcgagcgactggccacccacgacaccgcgttgcgggccgccggccgggcccgcacccttatctatcaccggctggcccacggaccggcggcggccgccgtcgggctgcacagcggggacctggcagcacgcgtcggcgcggacgtcgacgaactggccaacatgctggtgcgtgctctggtgccgatagccgtcgcagcggtgctggcagtagccgcgaccgcggtcgtcgcggccgtttcggtgccagccgccgtggtactggcggtctgccttttggttgccggcgttgttgcgccctggcttgccggcagaaccgccgcagcgcaggaagcgatcgcccgccaacatcggggcatgcgcgacacgtcggcgatgatcgcccttgagcatgcccccgagcttcgtgtcgccggtgccctacgcaacgtcatcgccgactcacaacggcgccaacatgcctgggccgatgcgctcgacgccgccgcacgaacgggggcgatcgccgaggccatgccgaccgcggcgatcggggccagcctgctgggcgccgtggtggccgggatcggcatggcccccacggtcgcgcccacaacactggccatcctgatgttgttgccgctgtccgcattcgaggcgaccgttgcactacccgccgccgccgtccagttgacacggtcgcgcatcgcggcggctcgtctgctcgacctgactgggtcaaaccgggtccgcgagaccgaatccacggtgtcggcgcgactgccggtaggtaccggggtgctagcggccgacgtgtgttgcggtcaccaagaggcgcagtcgatccgggtgacgattgacctaccgccgggtgcccggctggccgtcaccggcgcgagcggcgccggcaagacgacgctgttgatgacgctggccggcttgctgccgccggtgcacggccgggtgttgctggacggaactaacctgagcgacttcgatgaggatgaattacgcagcgctgtcagctttttcgctgaagatgcgcatatctttgctaccaccgttcgggacaacttgctgaccgcccgaggagactgccccgatgacgaactgatcgaggccctggatcgggtcggcctgtgcggctggctcgccggcctgcccgaggggttgtcgacggtgttgatcggtggcgcgcaagcggtctcggcgggtcagcgcagaaggttgctgctcgcccgggcggtgctttccccggctcggatcgtgttgctcgacgaacctgtcgaacacctcgacgccgccaacgccgaccttctgcgcgatctgctggccccgaactccgggatcatgagcgctatgcggaccgtggtggtagccacccaccacctgcccaacgacattcaatgcgccgagctgtccatagcgacggatcagagatgtcgccgccgcgggacgaactccagcgacaacaacaccaacgccagcgcaaagacctga

SEQ ID NO: 230 - DNA, 1458 bp, Mycobacterium Tuberculosis
atgaatgtcgtcgacatttcgcggtggcagttcggtatcaccaccgtctatcacttcattttcgtaccgctgaccatcggcctggccccgctgatcgcggtcatgcaaacgctgtgggtcgtcaccgataaccccgcctggtatcgcctcaccaaattcttcggcaaattgttcctgatcaactttgccatcggcgtggcgaccggaatcgtgcaggaatttcagttcggcatgaactggagcgagtactcccgattcgtcggcgatgtcttcggcgccccgctggccatggagggcctggcggccttcttcttcgaatccaccttcatcgggttgtggatcttcggctggaacaggctgccccggctggtgcatctggcctgcatctggatcgtcgcaatcgcggtcaacgtgtccgcgttcttcatcatcgcggcaaactccttcatgcagcatccggtcggcgcgcactacaacccgaccaccgggcgtgccgagttgagcagcatcgtcgtgctgctgaccaacaacaccgcacaggcggcgtttacccacactgtcagcggtgcgctgctgaccgccgggaccttcgtcgccgcggtgagcgcctggtggctggtccgttcgagcaccacgcacgccgactcagatacccaagccatgtatcgtcccgcgaccatcctggggtgttgggttgcgttggccgccacggccgggttgttgttcaccggcgaccaccaaggcaagctgatgttccagcagcagccgatgaagatggcgtcggccgaatcgttgtgcgatacccagacagatccaaacttctctgtcctgacggtcggccggcaaaacaactgcgacagcctcacccgtgtcatcgaagtgccctatgtgttgccgttcctcgccgagggccggatcagcggtgtgacgttgcagggtatccgcgatctgcagcaggaataccagcagcgcttcggaccaaacgactaccggcccaacctcttcgtcacctactggtcatttcgcatgatgatcgggttgatggcgatcccggtgctgttcgcactgattgcgctctggctcacccgtggcggccagatccccaatcaacgctggttctcctggctggcgctgctaaccatgcccgccccgttcctggccaacagcgccggatgggtgttcaccgagatggggcgccagccctgggtcgtcgtccctaacccgaccggtgatcagctggttcgactcaccgtcaaagcaggcgtctcggatcactccgccaccgtggtcgccacgtctttgctgatgttcaccttggtctacgcggtacttgcggtcatctggtgctggctgctcaagcgttacatcgtcgaaggccccctggaacacgacgcggaaccggctgcgcacggggcaccccgcgacgacgaggtagcaccattgtcgtttgcttactga

SEQ ID NO: 231 - DNA, 588 bp, Mycobacterium Tuberculosis
atgtgtcacactgcgcccatggaaccaagccctgtcgtgagccctctcccaaggttgttgccgcatctctggaagtccactctggcatcgggaattctgtcgctgatcctgggcgtcctggtgctggcctggccaggaatatccattctcgttgctgccatggcgttcggtgtctacctcctgattaccggtgtcgctcaggttgcgttcgcgttcagcctgcatgtttcggcgggcggccggatcctgttgttcatcagcggtgccgcctcactcatcctggctgtgctggcctttcgccatttcggtgacgcggttctgttgctggccatctggatcggcatcgggttcatcttccgcggcgtcgccaccacggtttcggcgattagtgatccgatgctgccgggacggggatggtccatcttcgtcggcgtgatcagcctcatcgccggcattgtggtgatggcatcgccgttcgagtccatctggatactggcgttggtcgtcggcatctggctcgtggtgatcggcacatgcgagatcgcgtcgtcgttcgccatccgcaaggcttcgcagacgctcggctga

SEQ ID NO: 232 - DNA, 1671 bp, Mycobacterium Tuberculosis
atgcatgcgagtcgtcccggcgcaccgccgcacgccgggctgcccagtcgccgaaccgccggtgaccaggatcatcgcgcggaccctaaggtgacccgcatcatgtccgcctccactctggagcagcccgcggcagcacacgtcgacgagttggtggcgcggatgcgcggccggctgctcgacccgctggcgattgcagtgctggccgcggtcatcagcggcgcctgggcaagcaggccatcgttgtggttcgacgagggggcaacgatctcggcttcagccagccggacattgccagagctatggagtctgctgggccatatcgacgccgtgcacggcctgtactacctgttgatgcatggctggttcgccatatttccgcccaccgaattatggtcgcggcttcccagctgcctggccattggagcggccgccgccggcgtggtggtttttgccaaacagttttcgggacgcaccacggcggtgtgtgcgggagccgtgttcgcgattctgcccagggtgacgtgggccggaatcgaagcacgctcctccgcgctgtcggtagcagccgccgtctggctgaccgtattactcgtggccgcggtgcggtgcaacacccagcggcggtggctgctctacgcgctggttttgatgctgtcgatcttggtcagtatcaacctggccctgttggtaccggcctatgcgacgatggtgccgctgctggcgtccgggaaatcacgcaaatctcccgtgatctggtggacggtcgtcacggcagccgcgctcggggccatgacaccgttcatactgttcgcccacggccaggtttggcaggtcgggtggatcgcagggttgaacagaaacatcattctcgacgtcatacaccgccagtatttcgatcacagtgttccgttcgccatcctcgcgggcctcatcgtcgctgccggcatcgcggcgcatctggccggagctcgtggacccggtggcgatacccaccggctcgtgctcgtcagcgcagcctggatcgtcgtgcccaccgccgtcgtcctcatctactcggcgaccgtcgaaccgatctactacccgcgctacctgatcctcaccgcccccgccgcggccgtcatcctggcggtttgcgtcgtcaccatcgcccgcaagccgtggctcatcgccggggtcgtgtttctccttgccgccgcagcgtttccgaactacttcttcacacagcgggggccgtacgcgaaagagggctgggattacagccaggtggcagatgtcatcagcgcccatgccaagcccggggattgcctgctggtggacaacaccgcgggttggcgacccgggcccatccgcgccctgctggccacccggccggcggcgttccggtcgctgattgacgtcgagcgcggcacctacggccccaaggtcggcactttgtgggatggccatgtcgctgtgtggcttacgacggccaagatcgacaagtgccccacgctgtggacgatagccaatcgtgacaagtcgttgcccgatcatcaggtcggcgaaatgttgtcaccgggaacaggcttcgggcgcacgcccgtataccggttcccgagctacctcggcttccgcatcgtcgagcgctggcagttccactactcgcaggtggtcaagtcaacgcggtaa

SEQ ID NO: 233 - DNA, 1470 bp, Mycobacterium Tuberculosis
atggctcagaatgaactggtgaccgcgtcgacgccgccagccgcgacgcagccgttagcagtaggccacacatcgctgatgcacggttgggtgccgctcgctgtccaggtcgtgaccgcggtcgtgctggtgctggcggcagggtggcgatcacgtcactggcaacggcggtggctgccgacggccgccgctatcggggccaccctggcatgggggacgcgctggtatgtcaccggcaacggcctggccaacgaacggccgccgagcacgctgtggatctgggtcgcgttgaccggcgcggcggcgacggtgttgatcctgggctggcgcagcgcgcggtggtggcgccgcggcgcgtcgctgctggccgtgcccctctgtctgctcagcgcgaccttgacgctcaacctgtgggttggctacttcccgaccgtgcagaccgcgtggaaccagctcacctccggcccgttgcccgaccaggccgatcaggccgctgttgccgcactggcgcacagtggggtgcggccgtcgcacggcacgttgttgccagtggtgatcccttccgacgcatcacacttcaagcatcgcggcgaactggtgtacctgccgccggcctggttcgaccgagagcatcgttccgagaaccctccgccgccgcagctgccgacggtgatgatgatcggcggtcaattcaacacacccgccgattgggcgcgagccggtaacgcggtgaagacgctcgacgactttgcggccgcccacagcggcaatgctcccgtcgtggtattcgtggattccggcggcgcgttcaacaacgacaccgaatgcgtcaatggacggcgtggcaacgcggccgaccacttgactaaagatgttgtgccctacatggtctcgaaattcggcgtcagtcccgaacagaccagctggggcatcgtgggttggtcgatgggtgggacctgcgcggtggatctgaccgtcatgcacccgacactgtttagcgcgtttgtcgacatcgccggtgatttctacccgaacgctggcaacaagacgcaaaccatcgtcaggttgttcggcggcaacgaagacgcctggtcggcgtttgacccgacgacggtgatcacccggcatggcagctacaccggactgtcgggttggttcgcgatctcttcgccgggtccaccctcgcccgacaacgctgtcgccgataccaccacgatgcggctggccggtcgcgatgccgccgccaacccaggcaaccaggccgctgccgccaatgcactgtgcgccctcggccgcgccaacggcatctactgcgccgtggttccacaaccgggcaagcacgactggcctttcgccgaccgggttttcgctgcggcgctgccatggctggccggccaactggccactccgggagtgcctaagatcccgttgccgggtacgacacagcagatcgccggtaccggcagatag

SEQ ID NO: 234 - DNA, 606 bp, Mycobacterium Tuberculosis
atcagcactgaaacccgcgtcaacgagcgcatccgcgtacctgaagtccgattgatcggcccagggggggagcaggtaggcattgtgcgtatcgaagacgcacttcgcgtcgccgcggacgcagatctcgaccttgtcgaagttgctcccaatgccagaccgccggtctgcaagatcatggactacggcaagtacaagtacgaggccgcgcagaaggcgcgcgaatcccgcagaaaccaacagcagaccgtcgtcaaagaacaaaagctgcgaccaaagattgacgatcacgattacgagaccaaaaagggtcacgtcgtccgcttcttggaggcgggatcgaaggtcaaggtcaccattatgttccgtggacgtgagcagtcgcggccggagttgggctatcgattgctgcagcggctgggtgcggacgtcgccgattacggattcatcgagacgtccgccaagcaggacggacgcaacatgacgatggtgctggcaccgcaccgcggtgcgaagacccgcgctagggcccgccacccgggtgaaccggccggcgggccgccgcccaagcccacggccggtgacagcaaagccgcaccgaactag

SEQ ID NO: 235 - DNA, 513 bp, Mycobacterium Tuberculosis
atgagccgcgccaaggccgcgcccgttgcggggcccgaggtcgccgcaaaccgcgccggccgccaggcgcgcatcgtggcgatcctgtcgtcggcgcaggtgcgcagccaaaacgaactggcggcgctgctggccgccgagggcatcgaggtcacccaagccacactgtcacgcgatctggaagagctcggcgcggtgaaactgcgcggcgcggacggcggcaccggcatctacgtggtgcccgaggacggcagcccggtgcgcggcgtctcgggcggtaccgaccggatggcgcggctgctcggtgagctgctggtgtcgaccgacgacagcggcaacctcgcggtgttgcgcaccccgccgggcgcggcgcactacctggccagcgccatcgaccgcgcggccctgccccaggtcgtcggcaccatcgccggtgatgacaccatcctggtggtggcccgcgagccgacgaccggcgcgcaactggccggcatgttcgagaaccttcggtaa

SEQ ID NO: 236 - DNA, 933 bp, Mycobacterium Tuberculosis
atgacgatcaccgaccccgcggtatccgcacacgcggatgcgacgatcgggctgttcgaaatcaccgatcacatcacgatcgattccacccaaggtgcccacaccgtcgagatgtggtgcccggtcatcggtgacggcgcgtttcaacgcgttctggacgtcgaggtgaccagcgaggatccctatgacctcacgcgtgagccggagttcgggaacctgatgttgtacagccggctgcgcttggcgacggcggcgagttggtctatccgctatgttgtggaacgccgggcgatcgggcatgctccggatccggcacgggcccgcccgttggccacggcgcaattgttcagccgcgccttgatccccgaagcacatgtcgatgtcgatgagcgcacccgtacgttggcccaagacgtcgtcggccccgagaccaacccgctcgaacaggcccgtcgcatctacgactacgtcaccggcgccatggactacgacgcgacgaagcagtctttcctgggcagcaccgagcatgccctgacctgctcggtgggcaactgcaacgacatccacgcattgttcgtctcgctgtgccgatcggtcgacatccccgcacgatttgtgctcggtcaggccttggagctaccgcagcccggtgcgcaggattgcgaggtgtgcggctaccactgctgggcggaattcttcgtcgctgggctgggttggctaccggcggacgcctcctgtgcgacgaagtacggcacccacggcctgttcgcgaacctgcaggccaaccacatcgcgtggtcgatcggccgcgacatcctgctcgccccaccacagcgggcgggccggagcctgttcttcgccggcccctacgccgagattgacggcgaaacacatccggcgcaacgccaaatccgttttactgcaatgacataa

SEQ ID NO: 237 - DNA, 549 bp, Mycobacterium Tuberculosis
gtgactcattcccgtctgattggcgcacttaccgtagtcgcaattatcgtcactgcatgtggttcgcaaccgaaatcccagcccgcagtggcacctaccggggacgcggccgctgccacccaggtgccggcgggccaaaccgttcccgcccagctgcagttcagcgccaaaacccttgatgggcacgactttcacggggaaagcctgctgggtaagcccgcggtgctgtggttctgggcgccctggtgtccgacgtgccaaggcgaagcgccggtagtcggccaggtcgccgcgtcacacccggaagtgacgttcgtcggggtggccggcctggatcaagtacccgcaatgcaggagttcgtcaacaaatacccggtgaaaacgtttacccagctggctgataccgacgggtcggtctgggcgaatttcggtgtcacccagcagcctgcgtacgcgttcgttgacccgcacggcaacgtcgacgtcgtcaggggtcggatgtcgcaggacgaactgacgcggcgcgtcacggcgttaaccagccgttga

SEQ ID NO: 238 - DNA, 918 bp, Mycobacterium Tuberculosis
gtgttgcctcaacgcccaaactgcaccaaactgtttcgcccacggcggggcgtgtctgagaggtatcgcgtgaccaccgcccataacggatccgctccgcgttttcaacgtacccgctctggctacgacccggtcgcagtcaatcattacatcgccgaactcgtgctgcgtcagcaggcgcagcactgtgagattgaaacgctcaaggcagaaatagccagtctgaaggacgaaaacgctgccctgaaggacacctcgccgtcagcacaggcggtgaccgatcggatggcgaaaatgcttcgactcgctgtcgacgaggtcttccagatgcagtcggaggcacgggccgaggccgcaacattagtttctgcggctagggatgaggcggaagcggtccgaacgcagaagcgagaaatgctggcggatatgaacgcccggcaaagagcgctggagtccgagcatgccgacgtgatgcgccgcgctcgtgaagaggctgaacagcttgtggcgcaggcaaccgccgaggtggagcggatgcgtgtcatcgatgccagacgccgtgagaaagccgagcaggaacttgatgccgaaatcatcaggcttcgcaccgatgcccaatttcagatcgacgatcagctgcaggccacacagcaggagtgtgagaagcggcttggcgaagccaaaatcgaggccgatcgacggctgcatgttgccgacgagcagattgagcacggcctcagcgaggctcggcgaacgttggaagagatcagccagcggcgagtcggcatcctcgaacaactagcgcgtattcacgcacagctcgagaatattccagcgctcctggaatcggctcgacatagcgagacggagccactgcagtccataaacggcgcggtcgctgagctacgggccatttag

SEQ ID NO: 239 - DNA, 3000 bp, Mycobacterium Tuberculosis
gtggtggatctcaatttttcgatggtcacgcgaccaatcgagcgcctggtggccacggcgcagaacggtctggaagtcctgcgactcgggggcctggaaaccggcagtgttccgtcgccgtcccaaatcgttgagagcgtaccgatgtacaagctgcggcggtattttccgccggacaaccgcccgggacagccaccggtgggtccgccggtgctgatggtgcacccgatgatgatgtcggcggacatgtgggacgtcacccgtgaagacggcgcggtggggatcctgcacgccagcgggctagatccctgggtcatcgacttcggctcacccgacgaggtcgagggcggaatgcgccgtaacctggccgaccacatcgtcgccctcagcgaggcggtcgataccgtcaaggacgccactggccacgatgtgcacttcgtcgggtattcgcagggtggcatgttctgctatcaggccgcggcataccggcgttcgaaggacatcgccagcgtggtcgcgttcggctcgccggtggacaccctggccgcgttgcccatgggcatcccggcgaacatgggcgctgcggtcgccgatttcatggccgatcacgtcttcaatcgcttggatatcccaagctggatggcgcgcatgggttttcagatgatggacccactcaaaaccgcgaaggcccgggtggacttcgtgcgtcagttgcacgaccgcgaggcactgctgccgcgggaacaacagcgccggttcctggaatccgaaggatggatcgcctggtcgggcccggcgatctcggaactgctcaagcagttcatcgcgcacaaccgaatgatgacgggtggtttcgccatcagcggccagatggtgacgcttaccgatatcacttgcccgatactggcgttcgtcggtgaggtcgacgacatcggccagccggcgtcggtacgcggcatccggcgggccgcgcccaactccgaggtctacgaatgtctcatccgggcagggcatttcggtctcgtcgtgggatcccgagcggcacaacagagctggccgaccgtggccgactgggtgcgctggatctccggcgacggcaccaaaccggaaaacatccacctgatggccgatcagccggccgaacacaccgatagcggtgtggctttcagctcccgggtcgcgcacggcatcggggaggtctcggaggctgcgttggcgctggctcgcggcgcggccgacgcggtcgttgcggccaacagatcggtgcgcacgctggcggtggagacggtgcggacgctgccgcgactagcccggttgggtcagctcaacgaccacacccggatctcgctgggccgcatcatcgacgaacaggcacacgatgccccgaagggtgaattcctgttgttcgacgggcgcgtgcacacctatgaggcggtaaaccggcggatcaacaatgtcgttcgtggcctcatcgcggtcggggtgcggcagggtgaccgtgtcggcgtgctgatggagactcggcccagcgcgctggtcgccatcgccgcgctgtctcggctgggagcggttgccgtggtgatgcggccagacaccgacctgtccgcgtcggtccggctcgggagagtgaccgagatcctgaccgaccctaccaatctggatgctgcgcgccagttgcccggacaggtgctggtgttgggtggtggtgaatcgcgtgatctggatctgccggccgacgcacttgaacagggccaagtcatcgacatggaaaaaatcgacccggacgccgtcgagttgccggcgtggtatcgaccgaatcccggattggcgcgggatctggcgttcatcgcgttcagttcggccgacggcgacctggtggccaagcagatcaccaactaccgctgggcggtgtcggccttcgggaccgcctcgacggcggccctcggccgcagagacacggtgtactgtttgacgccgctgcaccatgagtccgcactgttggtcagcctgggcggcgcggtcgtgggcggaacccgtatcgcattgtcccgcggcttgcgcccggaccggttcgtggccgaggtacgccagtacggcgtcaccgtcgtctcctacacatgggccatgctgcgtgacgtggtcgacgatccggcgttcgtgttgcacggcaaccatccggtgcggttgttcatcggctcgggcatgccgaccggattgtgggagcgggtcgtcgaagcgttcgcaccggcgcacgtcgtcgagtttttcgccaccaccgacggacaggcggtgctggccaacgtggctggcgccaagatcggcagcaagggccgtccgttgcctggcgccggacgtgtcgaacttggggcctacgacgccgaacatgacctgatcctggagaacgaccgcggcttcgtgcaggtcgccggtgtcaaccaggtcggggtgctgctcgcacaatccagagggccgatcgatccgaccgcgtcggtcaaacgcggtgtcttcgctcccgccgacacctggatatctaccgactacctattctggcgtgacgacgatggggactactggctggcgggtggacgcggctcggtggtgcgcactgcgcgcgggatggtttacaccgagccggtcaccaacgcgttgggcctcatcaccggtgtcgacctcgcggtgacctacggtgtattggtgcgcggtcgccacgtcgcggtgtcggcggtgacgttgctgcctggagcgaccatcacagccgccgacttgaccgaagccgtggcgagcatgccggtggggctgggacctgacatcgtgcacgtggtgccgcagctaacgctcagcggtacttaccggccaacggtcagcgcgttgcgggccaacgggattcccaaggcgggccgtcaggcatggtatttcaactccggcggcaacgagtaccggcggttgacgccggcggtccgcaccgagttgaccggccagcatcggcgcggcaatgcttga

SEQ ID NO: 240 - DNA, 1275 bp, Mycobacterium Tuberculosis
atgtctggcatgatcctcgatgagctcagctggcgcgggttgatcgcgcagtcgaccgacctcgacacgttggccgccgaagcacagcgcgggccgatgacggtgtacgccggcttcgatcccaccgcgcctagcctgcatgccggacatttggtgccgctgctgacgttgcggcgctttcagcgcgccggtcatcgccccatcgtgctggccggcggggccaccggcatgatcggtgatccacgtgacgtcggcgagcgcagtctcaacgaggccgacaccgtcgccgaatggaccgaacggatccgtgggcagctggagcgcttcgtcgacttcgacgactcaccaatgggcgcgatcgtcgagaacaacctggaatggaccggctcactatcggctatcgagtttctacgtgatatcggcaagcacttctcggtcaacgtgatgctggcccgcgacaccatccggcggcgtctggcgggggaggggatctcttacaccgaattcagctacctgttgctgcaggccaacgactacgtcgaattgcaccggcgccacggctgcacgctgcagatcggtggtgcagatcagtggggcaacatcattgccggcgtccggttggtgcgccagaagctcggtgccaccgtgcatgcgcttaccgtccccttggtgaccgctgccgacggcaccaagttcggcaaatcaaccggcggcgggagcctgtggttggatccccaaatgaccagcccctatgcctggtaccagtacttcgtgaacaccgcggacgcggatgtgatccgctacctacggtggttcaccttcttgtcggccgacgagttggccgagctggaacaggcgacagcgcaacgcccgcaacaacgggccgcccagcgccggctcgccagcgagctcaccgtcttggtgcatggcgaggcggcgaccgcagccgtcgagcatgccagccgggcactcttcggtcggggcgagttggcccgtctggacgaggcgacactggctgctgcgttgcgggaaaccacggtcgccgaactcaaaccgggcagtcccgacggaatcgtcgacttattggtggccagcggcctgtcggccagcaagggcgcggcgcggcgcacgatccacgagggtggggtgtcggtcaacaacattcgggttgataacgaggaatgggtgccgcaaagttcggacttcttgcacggccgctggttagtgctacgtcgtggaaagcggagtatcgccggggtggaacggattggctga

SEQ ID NO: 241 - DNA, 177 bp, Mycobacterium Tuberculosis
atgaccatcgatcctgaccagatccgtgccgaaatcgacgccctacttgcttcgctgcccgaccccgccgacgccgagaacggaccgtctctggccgaactcgaaggcatcgcacgtcgtctttccgaggcgcacgaggtgttgttggccgccctggagtcggcggagaagggttga

SEQ ID NO: 242 - DNA, 1761 bp, Mycobacterium Tuberculosis
gtgcgaaagcacccgcaaaccgctaccaagcacctcttcgtcagcggcggcgttgcttcctcgctcggcaagggactgaccgccagcagcctaggacaattgttgacggctcgtgggttacacgtcacgatgcaaaagctcgacccgtacctcaacgtcgacccgggtaccatgaacccgttccagcacggcgaggtcttcgtgaccgaggacggtgccgaaaccgatctcgacgtcggccactacgaacggttcctcgatcgcaatttgcccggctcagcgaatgtgactaccgggcaggtgtattcaacggtgatcgcgaaggagcgccgcggcgaatacctgggcgacaccgtgcaggtgatcccccatatcaccgacgagataaaacggcgcatcctggcgatggcccaaccggacgccgacggtaaccgcccggacgtggtcatcaccgaaatcgggggcactgtcggcgatatcgagtcacagcccttcctggaggcagcgcggcaagtccggcactatctcggccgggaggacgtgttttttctgcacgtgtcgctggtgccctacctggcgccgtcgggtgagctcaaaaccaagccaacacagcactcggtggccgcactgcgcagcattgggattaccccggacgcgttgatcctgcgctgcgaccgcgacgttcccgaagcgctgaaaaacaagattgcgttgatgtgtgacgtcgatatcgacggcgttatctccaccccggacgcgccctccatctacgacatacccaaggtattgcaccgcgaggagctcgatgcgttcgtggtgcgccgactcaatctgccgttccgcgacgtcgattggaccgaatgggacgacctgctgcgccgggttcacgaaccacatgagacagtgcgaattgctttggtgggcaagtacgtcgaattatccgacgcttacctctcggttgccgaggcattgcgtgccggcggattcaagcaccgggccaaggtcgagatctgttgggtggcatccgacggttgtgaaacgaccagtggtgccgcggcggcgctcggcgatgtgcatggggtgctcattccgggcggattcggcatcaggggcatcgagggcaagatcggtgccattgcatacgcgcgggcgcgcgggttgccggtgttggggctgtgcctcggtttgcagtgcattgtgatcgaggccgcgcgatcggtcggtctcaccaacgccaattcggccgaatttgatcccgacacaccagatcccgttatcgccacgatgcccgatcaagaagaaatcgtggccggcgaggcggatctgggcggtaccatgcgtctcgggtcctaccccgccgtgttggagccggattcggttgttgcccaggcataccaaactacccaggtgtccgagcggcatcgccaccggtacgaggtcaacaacgcgtaccgagacaagatcgccgaaagcggcctgaggttttccgggacgtcacctgacggacacttggtagagttcgtcgagtatccgccggatcggcatccgttcgttgtcggcacccaggcccaccccgagttgaagagccgacccacccggccgcacccactgtttgtcgcattcgtcggggcagccatcgattacaaggcgggtgagttgctgcctgtcgagatccccgagatccccgagcacacacccaacggtagctcccatcgggacggcgtgggccagccgctaccggaacctgcgtctcgtggctga

SEQ ID NO: 243 - DNA, 1158 bp, Mycobacterium Tuberculosis
atggattttggggcgttgccaccggaggtgaactccgggcgcatgtattgcggcccgggctcggcaccgatggttgccgcagcgtccgcgtggaacgggctggccgccgagctcagtgtggccgccgtcggctacgagcgggtgatcacgacgctgcaaaccgaagaatggctgggtccggcgtcgacgttgatggtcgaagcggtcgccccgtatgtggcgtggatgcgagccaccgccatccaagctgagcaggcagccagtcaggcgcgtgcggcggcggccgcttacgaaaccgcgtttgccgccattgtgcccccgccgctgatcgcggccaatcgcgcgcggctcacgtcgctggtcacgcataacgtgttcggtcaaaacaccgcatcaatcgcggccaccgaagctcaatacgctgaaatgtgggcccaagacgccatggccatgtacggttacgcgggctcctcggcgaccgcgaccaaagtgacgccgtttgccccgccgccgaacaccaccagcccatccgccgcggcgacgcagttgtccgcagtcgccaaagccgccggcacctcagccggcgcggcgcagagcgcaatagcggagctgatcgcccacttgcccaacacgctgctgggcctcacctcgcccctgtcgtccgcgttgaccgccgccgcgaccccggggtggctggaatggttcatcaactggtatctgccgatatcacagctgttttacaacaccgtgggtttgccatatttcgccattggtattggcaacagccttattacatcgtggcgggcgctgggatggatcggtcccgaggccgccgaagctgccgccgcggcgccggcggccgtcggcgccgcggttggcggtaccggacccgtatccgcgggtctaggcaacgcggccaccatcggcaagttatcgctgccgcccaactgggcaggggccagtccgagcctagccccgaccgtgggttcggcctccgcacccctggtcagcgatatcgtcgagcaaccggaggccggtgcggcgggaaacctgttgggcggcatgccgctagccggttcgggcaccggtacggggggtgcgggtccccgctacgggttccgggttacggtgatgtcccggccgccgtttgccggataa

SEQ ID NO: 244 - DNA, 1185 bp, Mycobacterium Tuberculosis
atgaccctcgatgtcccggtcaaccaggggcatgtccccccgggcagcgtcgcctgctgccttgttggggtcaccgccgttgctgacggcatcgccgggcattccctgtccaactttggggcgttacctcccgagatcaattcgggtcgtatgtatagcggtccgggatccgggccactgatggctgccgcggcggcctgggacgggctggccgcagagttgtcgtcggcagcgactggctacggtgcggcgatctcggagctgacaaacatgcggtggtggtcggggccggcatcggattcgatggtggccgccgtcctgccctttgtcggctggctgagtaccaccgcgacgctagccgaacaggccgcgatgcaggctagggcggccgcagcggcctttgaagccgccttcgccatgacggtgcccccgccggcgatcgcggccaaccggaccttgttgatgacgctcgtcgataccaactggttcgggcaaaacacgccggcgatcgccaccaccgagtcccaatacgccgagatgtgggcccaagacgccgccgcgatgtacggctatgccagcgccgcggcacccgccacggttttgactccgttcgcaccaccgccgcaaaccaccaacgcgaccggcctcgtcggccacgcaacagcggtggccgcgctgcgggggcagcacagctgggccgcggcgattccatggagcgacatacagaaatactggatgatgttcctgggcgccctcgccactgccgaagggttcatttacgacagcggtgggttaacgctgaatgctctgcagttcgtcggcgggatgttgtggagcaccgcattggcagaagccggtgcggccgaggcagcggccggcgcgggtggagccgctggatggtcggcgtggtcgcagctgggagctggaccggtggcggcgagcgcgactctggccgccaagatcggaccgatgtcggtgccgccgggctggtccgcaccgcccgccacgccccaggcgcaaaccgtcgcgcgatcgattcccggtattcgcagcgccgccgaggcggctgaaacatcggtcctactccggggggcaccgactccgggcaggagtcgcgccgcccatatgggacgccgatatggaagacgactcaccgtgatggctgaccggccgaacgtcggatag

SEQ ID NO: 245 - DNA, 957 bp, Mycobacterium Tuberculosis
ttgcctgcgggtctcccgggccaggcgtcggtagccgttagactttcctgcgatgtcccccctgacgcccgtcaccacgagccacgaccgggtatgaccgaccaccccgacaccggcaacgggatcggcctcaccggacggccaccacgggcaatccctgaccccgcgccgcgcagctcgcacggcccggccaaggtcatcgcgatgtgcaaccagaagggtggcgtcgggaagacgacgtcgacgattaacctgggtgccgcgctcggtgagtatggccggcgggtgctgctggtggatatggatccgcaaggagcgctgtccgcgggcctgggcgtgccgcactacgagctggacaagaccatccacaacgtgctggtggagccccgggtgtcgatcgacgacgtgctgatccactcccgggtgaaaaacatggatctggtccccagcaatatcgatctgtccgcggcggagatccaactggtcaacgaggtgggtcgcgagcagacgttggcccgggcgctgtacccggtgctggaccgctacgactatgtgctgatcgactgccagccgtcgctgggcctgctcaccgtcaacgggctggcctgcacggacggcgtgataattccgaccgagtgcgagttcttctcgctgcgcggcctggcattgctcaccgacaccgtcgataaggtgcgcgaccggcttaatccgaagctggatatcagcggaatcctgatcacccgctacgatccgcggaccgtcaactcgcgagaggtcatggcccgtgtcgtggaacggttcggtgacttagtgtttgacaccgtgatcacccgcacggttcgtttcccggagaccagcgtcgcaggcgaacccattaccacctgggcgccgaagtcggcgggtgccctggcctaccgtgcgctggctcgcgagttgatcgaccgatttggcatgtga

SEQ ID NO: 246 - DNA, 696 bp, Mycobacterium Tuberculosis
gtgaccgaacatatgcccgaacacgatccgagctatggcatcccggatatcgctgagcccgcggagctggatgccgacgagcttaagcgtgtgctagaggcgctgctgttggtgatcgacaccccagtgacagccgacgcgttggccgcggccaccgaacagccggtctaccgggttgcggcaaagctacagttgatggccgacgagctcaccgggcgtgacagcggcatcgacctgcgccacacgagcgagggttggcggatgtacacccgcgcccgattcgcgccctatgtcgagaagctgttgctggacggcgcgcgaaccaagctcacccgggccgcgctggagaccctggccgtggtggcctaccgccagccggtcacacgagcgcgggttagtgcggtgcgcggggtcaacgtggacgccgtgatgcgtacgctgttggcccgcggcctgatcaccgaggttggtaccgacgccgataccggcgcggtgacgttcgccaccaccgagctcttcctggagcgcttgggattgacgtcgctgtcggagctgcccgatatcgcaccgctgcttcccgacgtcgacacaattgacgacctgagcgaatccctggacagtgagccacgtttcatcaaactcaccggtgagctggcgtccgagcagacgctgtcgttcgacgtggaccgtgattga

SEQ ID NO: 247 - DNA, 693 bp, Mycobacterium Tuberculosis
gtgagtcgcctaagcgcagcggtagtcgcgatcgacgggccggccggcaccggaaaatcctcggtgtcaaggcgattagcgcgcgagctgggcgcacgctttctggacaccggggcaatgtatcggatcgtgacgttggcggtgctgcgtgccggtgctgatccgtccgatatcgctgccgtcgagacgattgcgtcgacggtgcagatgtcgttaggctacgatcccgacggagacagctgttaccttgccggagaagacgtttcggttgagatacgcggtgacgcggtcacccgtgcggtctccgcggtgtcgtcggtgccggccgtacgcacccggctggtcgagctgcagcgaacaatggctgagggcccgggcagcatcgtcgtggagggccgcgacatcggaaccgtggtgtttccggatgcgccggtgaaaatcttcttgaccgcctcggccgaaacgcgggcccggcggcgcaacgcccaaaacgtcgcggcgggtttggccgacgactatgacggggtattggccgatgtgcgccggcgcgaccacctcgattccacccgggcggtgtcaccgctgcaagccgccggtgatgccgtcatcgtggacaccagcgatatgaccgaggccgaggtggtcgcccatctgttggagctggtcacgcggcgaagtgaggcagtgcggtga

SEQ ID NO: 248 - DNA, 1392 bp, Mycobacterium Tuberculosis
gtgacccaggacggcacgtgggtggacgaaagcgattggcaactagacgattcggagatcgcggagtccggagcggcgcctgtggtggcggtagtcggccggcccaatgtcggcaagtccaccctggtcaaccggatcctgggccgccgcgaggcggtggtgcaggatattcccggcgtgacgcgtgaccgggtctgctacgacgcgctgtggaccggacgccggttcgtcgtacaggacaccggcggatgggagcccaatgccaagggcctgcagcggttggtggccgagcaggcctcggtggccatgcgcaccgcggatgcggtgatcctggtggtcgacgccggtgtcggtgccaccgccgccgacgaggccgcggcccgtatcctgttgcgatccggcaagccggtgttcttggccgccaacaaggtcgacagcgaaaaaggcgaatccgacgccgcggcgttgtggtcgctgggcctgggtgagccgcatgcgatcagcgcgatgcacggtcggggggtggccgacctgctcgacggggtgctcgccgcgctgcccgaggtgggggagtccgcgtcggcgagcggcggtcctcgccgggtggcgctggtcggtaagccgaacgtcggcaagagctccctgctgaacaaactcgcgggtgatcagcgatcggtggtccatgaggcggcgggcaccaccgtcgacccggtggattcgctgatcgagttgggcggtgacgtctggcggttcgtcgacaccgcgggattgcggcgcaaggtcggccaggccagtgggcatgagttctacgcctcggtgcgcacgcacgccgccatcgactccgccgaagtggccatcgtcctgatcgacgcgtcgcagccgctcaccgaacaggacttgcgagtgatatcgatggtcatcgaggccggacgggcgctagtcctggcctacaacaagtgggacctggtcgacgaggaccggcgcgagctgcttcagcgcgagatcgaccgagagctggtgcaggtgcgctgggcgcaacgggtcaacatctccgccaagacgggccgggcggtgcacaagctggtgccggccatggaggatgcgctggcgtcatgggacaccaggatcgcgaccggcccgctgaacacctggctcacagaggtgacggcggccacaccgccgccggtgcgcggcggcaagcagccacgcatcttgttcgcgacccaggccaccgcgcggccaccgacgttcgtgttgttcaccacgggttttttggaggccggctatcggcggttcttggagcggcggctgcgtgagacgttcgggtttgacggcagcccgatccgggtcaacgtgcgggtgcgagagaagcgggccggcaagcgccgctga

SEQ ID NO: 249 - DNA, 831 bp, Mycobacterium Tuberculosis
atgacgttcgcctggcccctcggtgccgccgaatcgacgttggagttctacgacctgtcccacccctggggacacggcgcgccggcctggccgtacttcgaggacgtgcagatcgaacgactccacggcatggccaagagtcgtgtgctgacccaaaagatcaccaccgtcatgcattccggcacccacatcgacgcgccggcgcacgtggtggaaggaacaccgtttctggacgagatcccgctgagcgccttcttcggcaccggcgtcgtcgtctcgatcccgaagggcaaatgggggatggtcaccgccgaggatctgcaaaacgctacccccgacatccggcccggtgacatcgtcgtcgtcaacaccggctggcaccacaaatacgccgacagcgccgagtactacgcctattccccgggcttcgacaagaaagcgggcgagtggtttgcggccaaaggcgtcaaggcggtcggcaccgacacccaggccctggaccatccgctggccacggccatcgccccgcacagtcccgcggaggcacagggcggcctattgccgtgggcggtacgcgaatacgaggcgcagaccggccgcaaggtgctcgacgacttcccggactgggaaccgtgccatcgggcgatcctgtcgcagggcatctacggctttgaaaacgtcggcggtgacctggacaaggtcaccggcaagcgcgtcactttcgcggcgttcccgtggcgctgggtgggtggcgacggctgcatcgtgcggctggtggcgatcgtcgaccccaccgggagctatcgcatcgagaccggaaaggcggtctga

SEQ ID NO: 250 - DNA, 711 bp, Mycobacterium Tuberculosis
gtgcagccgtacggccagtactgcccggtagcgcgggcggcggagctgctgggggaccgctggacgctgctaatcgtgcgggagctgctcttcggcccgctgcggttcaccgaaatcgagcggggcctgcccggcatctcccgctcggtgctggcccagcggctacgccgacttcagcacgaccgcatcatcgaagcggtccccgaacacacgggcgggggctatcggttcacggtggccggcgaggagctacgccccgtgctgcagaccctgggggactgggtctcccgttggttgatggccgaccccactcccgccgaatgcgaccccgaactactcacgttgtggatctcccggcgcgtcaacaccgaggcccttcccggccggcgggtggtggtggagttccgctaccacggcgagcggccactgtgggcctggctcgtgttggaacctggggacatctcggtgtgcctgcacgatccatgcctacctgtcgacctcacggtgcgcggccatcctcgagatctgtatcgggtctacagcggccgcagcacactggccgccgagatctccgccgagcgcatcgaactggacggcctgccggcgatgcggcgcgcgttcccatcctggatggcttggagtcccttcgccccagccatgcggcaagccgtggtgtccgtagaccagatgccggaggctcatggtgggtaa

SEQ ID NO: 251 - DNA, 1557 bp, Mycobacterium Tuberculosis
atgcctgcaccctcggccgaggttttcgatcgcttgcgtaacctggccgcgatcaaggacgtcgccgcacgtccgaccaggacgatcgacgaggtcttcaccggcaagccgttgactacgattccggtcggcacggccgcggacgtcgaagcggcattcgccgaagctcgcgcggcgcagaccgactgggcgaagcgtcccgtcatcgagcgagctgcagtcatccgccgctatcgcgacctggtcatcgagaaccgcgagttcctcatggacctcctgcaagccgaggcgggcaaggcccgatgggcggcgcaagaggaaattgtcgatctgatcgcgaacgcgaattattacgcacgagtctgtgtggacctgctgaagccccgtaaggcacagccgctgctgcccgggataggcaagaccacggtgtgctatcaaccgaagggcgtggtgggggtgatctcgccgtggaactaccccatgacgcttacggtgtcggactcggtgcccgcgctggtggccggtaacgcggtggtgctcaagccggacagccagacgccgtattgtgcgctcgcgtgtgccgagctgctgtatcgggcgggtctgccgcgagcgctgtatgcgatcgtgcccggtccgggctcggtggtgggcaccgccatcaccgacaactgcgactacctgatgttcaccggttcatcggcgaccggcagccgcctcgccgagcacgccggccgccggcttatcggtttctcggccgaacttggcggcaagaaccccatgatcgtggcgcggggtgccaacctcgacaaggtcgccaaggcggccacccgtgcctgcttctcgaacgccggccagctgtgcatctccattgagcggatctacgtcgaaaaggacatcgccgaggagttcacccggaagttcggcgatgcggtgcggaacatgaagctcggcaccgcatacgacttctcggtcgacatgggtagtttgatctccgaagcacagctgaaaaccgtgtccggtcacgtggatgacgcgacggccaagggcgccaaggtgattgcgggcggcaaggctcgacccgacatcgggccgctgttctacgagccgaccgtgctgaccaacgtcgcacccgaaatggaatgcgcggccaacgagacgttcgggccggtggtctcgatctacccggtcgccgacgtggacgaagccgtcgaaaaggccaacgacaccgactacgggctcaacgccagcgtctgggccggctccaccgcggagggccagaggatcgccgcccggctgcggtcggggacggtgaacgtcgacgaggggtacgcgttcgcctggggcagcctcagcgcgccgatgggcgggatgggcctctcgggggtcggccgccggcacggtccggagggcttgctcaagtacaccgaatcacagacgatcgcgaccgcccgcgtgttcaatctcgatccgcccttcggcatcccggccacagtctggcagaagtcactgttacccatcgtgcgcaccgtgatgaagcttcccggccgcaggtga

SEQ ID NO: 252 - DNA, 549 bp, Mycobacterium Tuberculosis
atggccgttgaatccagcatgctcgccctcggcacccccgcgccgtcgttcacactgccccagccggcgaccggcgccacggtcagcctcgacgagctcacgggtcccgccctcgtcgtcaccttcatctgtaaccactgcccgtacgtgcaacacgtcgccgccggattggccacgctcggccgggacctcgccgatcaaggcgtcccgatggtcggtatctccagtaacgacgtcgtcacctacccgcaggacgggcccgatcagatggtcgccgaggcccgccgccacggctggacgttcccgtatctctacgacgaaacccaagacgtcgcccgcgccttctccgcggcctgcacacccgacacgttcgtcttcgacggccagcgccgacttgtctaccgtggtcagctcgacgactcccgcccgggcaatggccgaccggtgacggccgccgacgtccgggccgcggtcgacgccctgctcgccgggcggccagtcaaccccgaccaacgaccgtcgatcgggtgcggcatcaagtggcgctag

SEQ ID NO: 253 - DNA, 633 bp, Mycobacterium Tuberculosis
atgatcgccacaacccgcgatcgtgaaggagccaccatgatcacgtttaggctgcgcttgccgtgccggacgatactgcgggtgttcagccgcaatccgctggtgcgtgggacggatcgactcgaggcggtcgtcatgctgctggccgtcacggtctcgctgctgactatcccgttcgccgccgcggccggcaccgcagtccaggattcccgcagccacgtctatgcccaccaggcccagacccgccatcccgcaaccgcgaccgtgatcgatcacgagggggtgatcgacagcaacacgaccgccacgtcagcgccgccgcgcacgaagatcaccgtgcctgcccgatgggtcgtgaacggaatagaacgcagcggtgaggtcaacgcgaagccgggaaccaaatccggtgaccgcgtcggcatttgggtcgacagtgccggtcagctggtcgatgaaccagctccgccggcccgtgccattgcggatgcggccctggccgccttgggactctggttgagcgtcgccgcggttgcgggcgccctgctggcgctcactcgggcgattctgatccgcgttcgcaacgccagttggcaacacgacatcgacagcctgttctgcacgcagcggtga

SEQ ID NO: 254 - DNA, 285 bp, Mycobacterium Tuberculosis
atgtgcggcgaccagtcggatcacgtgctgcagcactggaccgtcgacatatcgatcgacgaacacgaaggattgactcgggcgaaggcacggctgcgttggcgggaaaaggaattggtgggtgttggcctggcaaggctcaatccggccgaccgcaacgtccccgagatcggcgatgaactctcggtcgcccgagccttgtccgacttggggaagcgaatgttgaaggtgtcgacccacgacatcgaagctgttacccatcagccggcgcgattgttgtattga

SEQ ID NO: 255 - DNA, 612 bp, Mycobacterium Tuberculosis
atgacccgcagctaccggccagctccaccgatcgagcgggtggttttgctcaacgaccgcggcgacgcgacaggtgtggccgacaaggccaccgtgcacaccggcgacacccctttgcacctcgcgttctccagctatgtgttcgatctgcacgatcagctgttgatcacgcggcgggccgccaccaagaggacgtggccggcggtatggaccaacagttgctgcgggcaccccctgcctggcgaatcgctacccggcgccatacgccggcggctcgctgccgaactcggactgaccccagatcgggtcgatctgatcctgccggggttccgctaccgggccgctatggccgatggcaccgtggaaaacgagatctgccccgtctaccgagtccaggttgaccaacagccccggccgaactcggacgaggtcgacgcgatccgctggttgtcctgggaacaattcgtgcgcgatgttaccgccggcgtaatcgccccggtatccccttggtgccgctcacaactgggctacctgaccaaacttggaccatgtccggcacagtggcccgtggccgacgactgccggctaccgaaagccgcacatggtaattaa

SEQ ID NO: 256 - DNA, 1431 bp, Mycobacterium Tuberculosis
atgccgctcgcggaaggttcgacgttcgccggcttcaccatcgtccggcagttgggatccggcgggatgggcgaggtgtacctggcccggcatcccagactgccccgccaggacgcgctcaaggtactgcgggccgatgtgtcagccgacggcgaataccgggcacggttcaaccgcgaagccgatgccgcggcgtcgctgtggcatccacacatcgtcgccgtccacgaccgcggcgagttcgacggccagctctggatcgacatggacttcgtcgacggcaccgacaccgtatcccttctcagggatcgttatccgaacgggatgcccggccccgaggtcaccgagatcatcactgcggtggccgaagcgctcgactatgcccacgaacgtcggctgttgcaccgcgacgtcaaacccgccaacatcctgatcgccaatcctgattcacctgatcgtcgaatcatgttggccgacttcgggatcgccggctgggtcgatgatccaagcggattgaccgccacaaacatgactgtgggcaccgtgtcatacgcggctccggaacagcttatgggcaacgagctcgatggacgggccgaccaatacgcactagccgcgacggcgtttcacttgctgaccggctccccgccctttcagcacgccaaccccgccgtggtgatcagccagcatctcagcgcgtcacccccggcgatcggcgatcgggttcccgagctgacaccgctggacccggtcttcgccaaagcgctggccaagcaacccaaggaccgttaccagcggtgtgtcgacttcgcgcgcgcactcggccatcgtctgggcggcgcgggtgatcctgacgacacgcgggtgtcgcaaccggtcgccgtggccgcgcccgcgaaacgctcgctgctgcggaccgccgtcatcgtccccgcggtgctggcgatgctgctggtgatggccgtcgcggtcgccgtgcgggagttccagcgtgctgacgacgagcgtgcagcgcagcctgcgcggacgcggaccaccacatcggccggcacgaccacttcggtagcccccgcgagcacaacgcgcccggcccccacgaccccgaccacgactggcgccgccgacaccgcgactgcatcgccgaccgctgcggttgtcgccatcggcgccctctgcttcccgctcggcagcaccggcaccaccaagaccggggcgacggcctactgctcgacgctgcaaggcaccaacaccaccatctggtcgctgaccgaggacaccgtggccagtccgactgtgaccgccactgctgacccgacggaggcgccgctgcccatcgagcaggaatcgccgattcgagtgtgcatgcagcagaccggccagacccgacgggaatgtcgcgaggagattcgcagaagcaacggctggccgtga

SEQ ID NO: 257 - DNA, 1287 bp, Mycobacterium Tuberculosis
atgagcccgatatggagtaattggcctggtgagcaagtctgcgcgccgtcggcgatcgtacggccgacctcggaggctgagctggccgacgtgatcgcgcaggcggcgaaaagaggcgagcgggtacgcgcggttggcagcgggcattcgtttaccgacatcgcctgcacggacggggtcatgatcgacatgaccggcctgcagcgggtcctcgacgtggaccagccgactggcctggtgacggtcgaggggggcgcaaagctacgtgcgctgggaccccaattggcgcaacgacggctcggcctggagaaccagggtgacgtggatccccaatccatcaccggcgcgaccgcgaccgcgacgcacggaaccggggtgcgtttccagaatctgtcggcgcggatcgtttcgctgcggctggtcaccgcgggcggggaagtgctcagtctgtccgaaggtgacgattacctggcggcacgggtttccctcggcgcgctaggagtgatctcacaggtcaccctgcagacggttccgctattcacgttgcatcgccatgatcagcgacgctcgctggcgcagacgctggagcgcctcgacgagttcgtggacggtaatgaccatttcgagtttttcgtattcccttacgcagataaggcgttgacgcgcaccatgcatcgcagtgacgagcagcccaaacccacgcccgggtggcagcgcatggtcggcgagaacttcgagaacgggggattgagcctgatctgccagaccggccgtcgttttcctagtgtggcgccgcgactgaaccgcctgatgacgaacatgatgtcgtcctccaccgtgcaagaccgcgcctacaaggtctttgcgacccaacgcaaggtcaggttcaccgagatggagtacgcgatcccgcgtgaaaacgggcgcgaggcgctccagcgtgtcatcgaccttgtgcgccgtcgcagcttgccgatcatgtttccgattgaggtgcgattctccgcccccgacgattccttcctgtcgaccgcatatgggcgcgacacttgctacatcgcggttcatcaatacgccggtatggagttcgaaagctacttccgcgccgtcgaggagatcatggacgactacgccggtcggccacactggggtaaacgtcactatcagaccgccgccacgcttcgtgagcgctatccgcagtgggatcggttcgccgcggttcgcgatcgcctcgatccggaccgggtgtttctcaacgactacacccggcgcgttctcggtccctga

SEQ ID NO: 258 - DNA, 747 bp, Mycobacterium Tuberculosis
gtgccgcctacggaaggaaagtcgacaacgaatcgcgacgaaggcatccaggtgctccgtcgcgccgtcgccgcgctggacgaaatagctgccgaaccgggacacctgcgcctagtcgatctctgcgagcggctggggctggccaaatcgacgactcgacgcttgctggtcggcctggtcgaggtggggctggttagtgtcgattcgcacggccgcttcgcactgggcgagcgtttgctgggattcggaagtgtcaccggagcccacatagccgcggcgttccggccgaccgtcgagcgagttgcccgcgcgaccgacggcgaaacggtcgacctgtcggtactgcgcggccagcgaatgtggtttgtcgaccagatcgaatcgtcttaccggctgcgtgcggtctcagccgtcgggctccgcttcccgttgaacggaaccgcgaatggaaaagcggcgctggctgctctcgacgacgccgacgccgaggccgcgctctgccgtctggatcccatggtggccgaaggtctacggcgcgagatcgtcgagatccggcgcaccggtatcgctttcgaccgcaacgagcacaccccagggatatccgcggctgcgatcgcacgacgcgccctgggcgacaacgtgatcgcgatctcggtgccggcgcccaccgcacgatttctggaaaaagagcagcgcataatcgccgcgttgcgcgccgccgcggactcgccggactggactcgctga

SEQ ID NO: 259 - DNA, 2175 bp, Mycobacterium Tuberculosis
atgaccgagctcgcgccttcgctggtcgaacttgcccgacgattcggcattgccaccgagtacacggactggactggccggcaggtgctggtctccgaggctacattggtggctgctcttgccgccctcggcgttcccgcccagaccgaacagcaacgcaatgacgccctggccgcgcagctgcgatcctactgggcgcgtccattgccggcgaccatcgtcatgcgcgccggagagcagacgcagttcagggtgcatgtgaccgatggcgctccggccgacgtgtggttgcagctcgaggacggcacgacacgtgccgaggtggtgcaggtcgacaatttcaccccgccattcgatcttgacggacgctggatcggcgaggccagcttcgtgttgcccgccgacctgcccctcggctaccaccgggtgaatctgcgttcgggcgactcgcaggccagcgccgctgttgtcgtgacgccggattggttggggctgccggacaagctggcaggccgtcgtgcctggggcctggccgtccagctctacagcgtgcggtcccggcagtcatggggcatcggggatctcaccgatttggcgaatctcgcgctgtggtcggcgtctgcgcacggtgccggctatgtgctggtcaatcccctgcatgcggctacgcttcccgggcccgctgggcgctcgaagccaatcgaaccatcgccctacctgccgacatcgcgacgcttcgtcaaccctctctaccttcgggtggaggccattccggaactcgtcgatctgcccaagcgtggccgggtgcaacggttgcgcaccaacgtgcaacagcacgccgaccagctcgacaccattgaccgcgacagcgcctgggcggccaaacgcgcagcactcaagctcgtgcaccgggtgccgcggtcggcgggtcgcgagctggcctacgccgccttccgtacccgcgagggccgcgccctcgacgacttcgccacctggtgcgcgctggccgagacgtacggcgatgattggcatcgatggccgaaatcgctgcggcatcccgatgcctcaggtgtcgccgatttcgtcgacaaacacgccgatgccgtcgatttccaccgctggctgcagtggcagctggacgagcagctcgccagtgcgcagtcgcaggcgctccgggccggcatgtcgctgggcatcatggcagacctcgccgttggcgtgcaccccaacggggccgacgcctgggctctgcaggacgtgctggcccaaggtgtgaccgcaggtgcgccgccggatgagttcaaccaactcggccaggactggtcgcagccaccgtggcggccggaccggctcgctgagcaggagtaccgaccgtttcgcgcgctgatccaggccgcgttgcggcacgccggtgcggtacgcatcgaccacatcatcgggctgttccggttgtggtggatccccgacggcgcaccgcccacccaaggcacctatgtgcgctacgaccacgacgcgatgatcggcatcgtcgccctggaagcccaccgggccggggcggttgtcgtcggtgaggatctcggcaccgtcgagccgtgggtacgcgactatctactattgcggggcctgctgggcacctcaattctctggtttgagcaggatcgagattgcgggccggctggaacaccattgccggccgaacgctggcgggagtactgcttgtcgtcggtgaccacccatgatctgccgccgaccgccggctacctggccggcgaccaggtacggctgcgcgagtcccttgggttgttaaccaaccccgtggaggcggaactcgaatccgcccgggccgaccgggcagcctggatggccgagctgcgccgggtcggactgctggcggacggtgccgagcccgactcggaggaggccgtcctggctctctaccgctacctgggccgaacgccctcgcggctgttggcagtggcgttgaccgatgcggtcggcgaccgccggacgcaaaaccagcctggcaccaccgacgagtacccgaactggcgggtgccgctcaccggccccgacggtcagccgatgctgctcgaggacatcttcaccgatcgcagggcagccaccttggccgaggcggtgcgcgctgcgacgacctcaccgatgagctgttggtga

SEQ ID NO: 260 - DNA, 204 bp, Mycobacterium Tuberculosis
gtgaaagtccgtctcgatccatcgagatgcgtgggtcatgcgcagtgctatgccgtcgatccggacctgttcccgatcgacgactcgggcaactcgatcctggcagagcacgaggtgcggcccgaggacatgcagctgaccagagacggtgtggccgcttgccccgaaatggcgctcatcctcgaggaggacgacgcggactga

SEQ ID NO: 261 - DNA, 348 bp, Mycobacterium Tuberculosis
atgaccgcttctgtcgtggctacttcccgtgaacgtcactcacacaaggccgcgaagcaacgagcttgcgaaataacggatttcgaaccggaaggccgattcagagtgcgaaaacggcgccggggtcggatcggaacgaaacggtcgtcgatctcggatacggactatcgccgggactcatttcgctctcacctcctcacggccggggcacacggggatgccgatgcacagcacaaagggatgacagcccagcagaccaccgaactcggcacccctctcgtcagagctttggcaccacacggcgtatccggccggtccagccggaagccacttgggctcaacccttaa

SEQ ID NO: 262 - DNA, 744 bp, Mycobacterium Tuberculosis
gtgagcgcacccgatagccccgcgctggccgggatgtcgatcggggcggtcctcgacctgctacgaccggattttcctgatgtcaccatctccaagattcgattcttggaggctgagggtctggtgacgccccggcgggcctcatcggggtatcggcggttcaccgcatacgactgcgcacggctgcgattcattctcactgcccagagggaccattacctgccgctgaaggtgatcagggcccagctggacgcccagcccgacggtgagttgccaccattcggatctccttacgttctaccgcgattggtgcccgtagccggcgacagtgctggcggcgtcgggtcggacaccgcgtccgtgtcgctcacgggtatccggctcagtcgggaagacctcctggaacgatcggaagtggccgacgagctactgacggccctgctcaaagccggtgtgatcaccaccgggccgggcggcttcttcgacgaacacgccgtcgtgatcctgcaatgcgcacgagcgctggccgaatacggcgtcgagccgcggcatctacgcgccttccgctccgcggccgaccggcagtccgacctgattgcccagattgccggcccgctcgtcaaggccggcaaggccggtgcccgcgaccgggccgacgacttggcccgtgaggtggccgcgcttgctataactttgcacacgtcgctgatcaagtctgcggttcgcgacgttcttcaccgctga

SEQ ID NO: 263 - DNA, 2034 bp, Mycobacterium Tuberculosis
atgggtaggcacagcaagcccgaccccgaggattccgttgacgacctgtccgacgggcatgcggcggaacaacagcactgggaggacatatcgggtagctacgactatcccggtgtagatcagcccgatgacggcccgttatccagcgagggccactactccgccgtcggcggctactcggctagcggctcagaagactaccctgacattccaccccgccccgactgggagccaacgggtgccgagcccatagcggccgccccgccgccgctgtttcgcttcggacatcgggggcccggcgactggcaggccgggcaccgtagcgcggacgggcggcggggagtcagtatcggcgtgatcgtggcccttgtcgcagtggtggtaatggtggccggggtgatcttgtggcgcttcttcggtgacgcgttgtccaaccgctcgcatacggctgccgcccgctgcgtgggcggcaaggacaccgtcgctgttatagccgacccatcaatcgccgatcaggtaaaggagtcagccgacagctacaacgcgtcggcgggcccggtcggcgaccgttgtgtggcagtggctgtcacctcggccggctccgatgccgtcatcaatggtttcatcggcaaatggccgaccgaactgggcggccagccgggattgtggattccgagtagctccatctcggcggcgcggcttaccggggccgcgggcagccaagccattagcgatagccgctcactggtgatatcgccggtgttgctcgccgtgcggcccgaattgcagcaggccctcgccaaccagaactgggcggcgttgcccggcctgcaaaccaatccgaactcgttgtccggcttggacttgcctgcctggggatcactgcggctggcaatgccgagcagtggcaacggcgatgccgcgtatttggccggcgaggcggtggctgccgcgtcagcacctgctggcgcgccagcaacagcgggtatcggcgcggtgcgcaccctgatgggcgcacgacctaagctcgccgacgactccttgaccgcggcgatggacacgctgctcaagcccggcgatgtcgccacggcacccgtgcacgcggtggtcaccaccgaacaacagttgttccagcgcggccagtcactttcagatgccgagaacaccttgggttcctggctgccgccggggccggctgcggtcgctgactatccgacggtgctgctcagtggtgcatggctatcgcaggagcaaacgtcggcggccagcgcgtttgccaggtatttgcacaagcccgagcaactggccaaactggccagagctggtttccgagtcagcgacgtcaaaccgccgagcagccccgtcaccagtttcccagcgctgccttcgactttgtcggtgggtgacgactccatgcgcgcgaccctggcggacaccatggtcaccgcgtcggccggagtggccgcgaccatcatgctcgaccaatcgatgcccaatgatgaaggcggcaatagccggcttagcaatgtcgttgcggcgcttgagaaccggatcaaggcgatgccgcccagttcggtcgtcggactgtggacattcgacggccgcgagggccgaacagaggtgccggccgggccattggccgacccggtcaacggccagccccgccccgcggccttgacggccgcgttgggcaagcaatactcctcgggcggtggcgcggtgtcgttcaccactctgcgcttgatctatcaggagatgctagccaattaccgtgttggccaggctaattctgtgctggttattaccgcggggccgcatacggaccaaaccctcgacgggccgggcctgcaggatttcatccgcaagagcgcagacccggccaagccgatcgcggtcaacatcatcgacttcggtgctgatcccgatcgggcaacctgggaagccgtcgcacagctcagcggcggcagctaccaaaacctggagacatcggcatcccccgacctggcaaccgcggtcaacatcttcttgagctga

SEQ ID NO: 264 - DNA, 2226 bp, Mycobacterium Tuberculosis
atgacagatcgcgtgtcggtgggcaacttgcgcatcgctcgggtgctctacgacttcgtgaacaatgaagccctgcctggcaccgatatcgacccggacagcttctgggcgggcgtcgacaaggtcgtcgccgacctgaccccgcagaaccaagctctgttgaacgcccgcgacgagctgcaggcgcagatcgacaagtggcaccggcgtcgggtgatcgagcccatcgacatggatgcctaccgccagttcctcaccgagatcggctacctgcttcccgaacctgatgacttcaccatcaccacgtccggtgtcgacgctgagatcaccacgaccgccggcccccagctggtggtgccggtgctcaacgcgcggtttgctctgaacgcggccaacgctcgctggggctccctctacgacgccttgtatggcaccgatgtcatccccgagaccgacggcgccgaaaaaggccccacgtacaacaaggttcgtggcgacaaggtgatcgcgtatgcccgcaagttcctcgacgacagtgttccgctgtcgtcgggttcctttggcgacgccaccggtttcacagtgcaggatggccagctcgtggttgccttgccggataagtccaccggcctggccaaccccggccagttcgccggctacaccggcgcagccgagtcgccgacatcggtgctgctaatcaatcacggtttgcacatcgagatcctgatcgatccggagtcgcaggtcggcaccaccgaccgggccggcgtcaaggacgtgatcctggaatccgcgatcaccacgatcatggacttcgaggactcggtggccgccgtggacgccgccgacaaggtgctgggttatcggaactggctcggcctgaacaagggcgacctggcagcagcggtagacaaggacggcaccgctttcctgcgggtgctcaatagggaccggaactacaccgcacccggcggtggccagttcacgctgcctggacgcagcctcatgttcgtccgcaacgtcggtcacttgatgacgaatgacgccatcgtcgacactgacggcagcgaggtgttcgaaggcatcatggatgccctattcaccggcctgatcgccatccacgggctaaaggccagcgacgtcaacgggccgctgatcaacagccgcaccggctccatctacatcgtcaagccgaagatgcacggtccggccgaggtggcgtttacctgcgaactgttcagccgggttgaagatgtgctggggttgccgcaaaacaccatgaagatcggcatcatggacgaggaacgccggaccacggtcaacctcaaggcgtgcatcaaagctgccgcggaccgcgtggtgttcatcaacaccgggttcctggaccgcaccggcgatgaaatccacacctcgatggaggccggcccgatggtgcgcaagggcaccatgaagagccagccgtggatcttggcctacgaggaccacaacgtcgatgccggcctggccgccgggttcagcggccgagcccaggtcggcaagggcatgtggacaatgaccgagctgatggccgacatggtcgagacaaaaatcgcccagccgcgcgccggggccagcaccgcctgggttccctctcccactgcggccaccctgcatgcgctgcactaccaccaggtcgacgtcgccgcggtgcaacaaggactggcggggaagcgtcgcgccaccatcgaacaattgctgaccattccgctggccaaggaattggcctgggctcccgacgagatccgcgaagaggtcgacaacaactgtcaatccatcctcggctacgtggttcgctgggttgatcaaggtgtcggctgctcgaaggtgcccgacatccacgacgtcgcgctcatggaggaccgggccacgctgcgaatctccagccaattgttggccaactggctgcgccacggtgtgatcaccagcgcggatgtgcgggccagcttggagcggatggcgccgttggtcgatcgacaaaacgcgggcgacgtggcataccgaccgatggcacccaacttcgacgacagtatcgccttcctggccgcgcaggagctgatcttgtccggggcccagcagcccaacggctacaccgagccgatcctgcaccgacgtcgtcgggagtttaaggcccgggccgctgagaagccggccccatcggacagggccggtgacgatgcggcccgctag

SEQ ID NO: 265 - DNA, 1440 bp, Mycobacterium Tuberculosis
gtgatgagatttctagacgggcacccacccgggtacgacctgacatacaacgacgtgttcatcgttccgaaccgatccgaggtcgcgtcgcgcttcgacgtcgatttgtccaccgccgacggctcgggcaccaccattccggtagtggtcgccaatatgaccgcggtagccgggcggcggatggccgagacggtcgcccgccgcggtggcatcgtaatcctgccgcaggatctgccgatcccggcggtaaagcagacggtggcgttcgtcaaaagccgggacctggtgctcgacaccccagtgacgctggcacccgacgattcggtgtccgacgccatggcgctcatccacaagcgcgcacatggcgtcgcggtggtcatcctcgagggtcgcccgatcggattggtgcgcgaatcgtcctgcctgggcgtggatcgcttcacccgggtgcgcgatatcgccgtgacggactatgtgaccgctccagcgggaaccgagccacgcaagatcttcgacctgctggagcacgccccggtcgacgttgcggtgctgaccgacgccgacggcacgttggcgggagtgctaagccgcaccggggctatccgcgccggtatctacaccccggccaccgatagcgcgggccggctgcggatcggcgcggccgtcggcatcaacggcgacgtgggcgctaaggcccgagcgctcgccgaagccggcgtcgacgtgctggtcatcgacaccgcacacggacaccaggtcaagaccttggacgcgatcaaggcggtctcggcactggacttgggtttgccgctggcggcgggaaacgtggtgtcggcggagggcacccgggatctgctgaaagccggggcgaacgtcgtcaaggtcggtgtcggccccggcgccatgtgcaccacccgaatgatgaccggtgtcggccgcccgcagttctccgctgtgctcgaatgcgcttctgcggcaaggcagctcggtggtcatatctgggccgacggcgggatccggcatccacgcgacgtggctctggcgctggccgccggcgcctcgaacgtgatgatcggatcgtggttcgccggcacctacgaatcccccggagacctgatgcgtgaccgcgacgatcagccgtacaaggagagctacggcatggcatccaagcgggcggtggtggcccggaccggcgcggacaacccgttcgaccgagctcgtaaggcgttgttcgaggaaggcatctcgacgtcgcggatgggccttgaccccgaccgcggaggtgtggaggacctaattgaccacatcacttctggcgtgcgcagcacctgcacctatgtgggtgcctcgaacctggcggagctgcatgagcgggccgtggtgggcgtgcagtcgggagcgggctttgccgagggccatccgctgcccgccggctggtga

SEQ ID NO: 266 - DNA, 786 bp, Mycobacterium Tuberculosis
gtgcgttggatcggactgtcaactggcctagtgtcagcgatgctggtcgcgggcctggtggcatgtggatcgaattcacccgcatcgtcgccagccgggccgacgcagggtgcccggtcgatcgtggtgttcgcggctgcctcgctgcagtctgcgttcactcagatcggtgagcagttcaaagccggcaacccaggggttaacgtcaacttcgctttcgctggttcttctgagttggccacccagctgacccagggcgcgaccgccgacgtctttgcatctgcggacaccgcgcaaatggacagtgtggccaaggcggggttgctggccggtcatccgacaaacttcgccaccaacacgatggtcatcgttgccgccgcaggcaatcccaagaagatccgatcttttgccgacctcacgcggccggggctcaacgtggtggtctgccagccgtcggtgccatgcggatcggcgacccggcgcatcgaagatgcaaccgggattcatctcaacccggtcagtgaggaacttagcgtgaccgacgttctgaacaaggtcatcaccgggcaagccgatgccgggctggtctatgtcagtgacgcgctcagcgttgccaccaaagtgacgtgtgtcagatttcccgaagccgcgggtgtggtcaatgtctacgccatcgcggtgctaaagcggacctcccagcccgctctggcccggcagttcgtggccatggtgaccgctgcggcaggtcggcggatcctggatcagtcgggtttcgccaagccctga

SEQ ID NO: 267 - DNA, 861 bp, Mycobacterium Tuberculosis
gtgccaggcaggacatccatcggcgtcaagatccgggacaaggtccaggacaaagtaatcgccatcaccggcggcgcccgggggatcggattggccacagcggccgcgctgcacaacttgggagccaaggtcgctatcggcgacatcgatgaggcgatggcgaaagagtcgggtgccgatctcgacctcgacatgtacggcaaactcgatgtcaccgacccggattcgttttcgggattcctcgacgccgtcgagcgccaactcggcccgatcgacgtgctggtcaacaacgccggcatcatgcccgtggggcggattgtcgacgaaccagacccggtaacccgccgaatcctggacatcaacgtctacggggtgatcttgggtagcaagctggcggcgcagcggatggtcccgcgcgggcggggacacgttatcaatgtcgcctcgcttgccggggaaatctacgccgtaggcgtggccacttactgtgccagcaagcacgcggtggtcgcgttcaccgattcggccaggcttgaataccgttcggccggcgtgaagttctcgatggtgttgccgtcgtttgtcaacaccgagctcattgcgggcaccggtgggatcaaaggattcaagaacgccgagccggccgatatcgccgacgcgatcgtcgggctgattgttcatcccaaaccgcgggtgcgggtcacgaaagcggctggctcgatgatcgtggcacagcggttcatgccgcgccaggtttccgagggcttgaaccgactcctcggcggcgagcatgtcttcaccgacgatgtcgacatggagaagcgcaggacctacgaggctcgggctcgcggcgaggagtga

SEQ ID NO: 268 - DNA, 390 bp, Mycobacterium Tuberculosis
ttgaatgcagctatgaatctcaagcgggaattcgtccatcgcgtgcaacggttcgtggtcaatccaatcggccggcaactgccgatgaccatgctcgaaaccatcggccgcaaaacgggacagccgcggcgtaccgcggtgggcgggcgcgtcgtagacaaccagttctggatggtgtccgagcacggcgagcattccgattacgtctacaacatcaaggccaaccccgccgtgcgggtccgcatcggcggccgatggcgcagtgggaccgcctacctgctacccgacgacgatccgaggcagcggctgcgcggcctaccccggctgaacagtgccggcgtacgcgcgatgggcaccgacttgctgaccatccgggtggatttggactga

SEQ ID NO: 269 - DNA, 834 bp, Mycobacterium Tuberculosis
atgaaagcgatattcatcaccggcgccggcagtggaatgggccgcgagggtgcaacgcttttccacgccaacggctggcgagtaggtgcgatagaccgcaatgaggatgggctggctgccctgcgcgtacagcttggtgccgaacggctgtgggcccgcgccgtcgacgttacggacaaggcggcccttgagggtgcgctcgctgatttctgcgccggcaatgtcggcggcggtctcgacatgatgtggaacaacgccggcatcggcgaaggcggttggttcgaggacgtgccgtacgaggccgccgtgcgcgtcgtcgacgtgaacttcaaggcggtgctcactggcgcctacgccgcactgccttacctcaagaaagcaccgggaagtctgatgttctcgacgtcgtcgtcctcgggcacctatggcatgccgcgtatcgcggtctactcggcgaccaaacacgccgtcaaggggttgaccgaggcgttgagcgttgagtggcagcgtcatggggttcgcgtcgccgacgtgctgcccggtctgatcgacaccgctatcctcacctcgacgcgccagcattccgacgagggcccctacacgatctccgcggagcagatccgcgctgccgcgcccaagaagggcatgttccggctgatgccctcgtccagcgtcgccgaggcagcctggcgggcctaccagcaccccacacggttgcattggtatgtgccccgaagcattcgctggattgatcggctcaagggcgtcagtccggagttcgtccgacgtcacattgccaagtccctggccacgttggagccaaaacggaagtaa

SEQ ID NO: 270 - DNA, 978 bp, Mycobacterium Tuberculosis
atgacagacgtgagccgaaagattcgagcttggggacgccgattgatgatcggcacggcagcggctgtagtccttccgggcctggtggggcttgccggcggagcggcaaccgcgggcgcgttctcccggccggggctgccggtcgagtacctgcaggtgccgtcgccgtcgatgggccgcgacatcaaggttcagttccagagcggtgggaacaactcacctgcggtttatctgctcgacggcctgcgcgcccaagacgactacaacggctgggatatcaacaccccggcgttcgagtggtactaccagtcgggactgtcgatagtcatgccggtcggcgggcagtccagcttctacagcgactggtacagcccggcctgcggtaaggctggctgccagacttacaagtgggaaaccttcctgaccagcgagctgccgcaatggttgtccgccaacagggccgtgaagcccaccggcagcgctgcaatcggcttgtcgatggccggctcgtcggcaatgatcttggccgcctaccacccccagcagttcatctacgccggctcgctgtcggccctgctggacccctctcaggggatggggcctagcctgatcggcctcgcgatgggtgacgccggcggttacaaggccgcagacatgtggggtccctcgagtgacccggcatgggagcgcaacgaccctacgcagcagatccccaagctggtcgcaaacaacacccggctatgggtttattgcgggaacggcaccccgaacgagttgggcggtgccaacatacccgccgagttcttggagaacttcgttcgtagcagcaacctgaagttccaggatgcgtacaacgccgcgggcgggcacaacgccgtgttcaacttcccgcccaacggcacgcacagctgggagtactggggcgctcagctcaacgccatgaagggtgacctgcagagttcgttaggcgccggctga

SEQ ID NO: 271 - DNA, 432 bp, Mycobacterium Tuberculosis
gtgcgggttctggtgcaacgggtctcatcggctgcggtgagggtcgatggtcgggtggtcggcgctatccggccggacgggcagggcctggtcgcgttcgtcggtgtcacccacggcgacgatctcgacaaggcgcgccgtctcgccgaaaagctctggaatttgcgggttctcgccgacgagaaatccgcctccgacatgcacgcaccgatcctggtaatcagccagttcaccctctacgcagacaccgcgaagggtcggcgaccgtcctggaacgccgcggcgccaggtgcggtggcgcagcccctgatagcagcgttcgcggcagcgctgcgccagttgggagcgcacgtggaagccggcgtgttcggtgcccacatgcaggtcgaactggtcaacgacggtccggtgaccgtaatgctggaaggctga

SEQ ID NO: 272 - DNA, 1293 bp, Mycobacterium Tuberculosis
atggcggtgagcgcacgtgcgggcatcgtgatcaccggaaccgaggtcctgaccgggcgggtccaagaccgcaacggcccctggatcgccgatcggctcctggagctcggggtcgagttggcacacatcacgatctgcggcgaccgtcccgccgacatcgaggcacagctgcgattcatggctgagcagggtgtggacctgatcgtcaccagcggcggcctggggccgaccgccgacgatatgaccgtcgaggtggtggcgcgctattgcgggcgcgagctggtgctggacgacgagctggagaacaggatcgccaacatcctcaagaagctgatggggcgaaatcccgctattgaacccgccaacttcgactccatacgcgccgccaaccgcaaacaggccatgattccggccggatcgcaagtgatcgatccggtgggcaccgcccccggtctggttgtgccgggacggccagcggtgatggtgcttcccgggccaccgcgcgagctgcagccgatatggagcaaggccatccagacggctccggtacaggatgcgattgccggccggacgacctaccgacaggagaccatccggatcttcggcctgccggagtcttctctggccgacacactgcgtgacgccgaggcagccatcccgggttttgacttagtcgagatcaccacctgcctgcggcgcggcgagattgaaatggtcactcgctttgaaccgaacgccgcgcaagtgtacacgcaattggcacggttattgcgcgaccggcacggccaccaggtctattcggaagacggtgcgtccgtggacgagctggtcgcaaaattgctaactggccgccggatagcgaccgccgaatcctgcaccgcagggttgctggcggcacggctcaccgaccggcccgggtcgtccaagtacgtggcgggcgcagtggtggcctactctaacgaggcgaaggcacagcttctcggtgtggatccggcgctgatcgaggcccacggggcggtttccgagccggtcgcccaggcaatggcagcgggggcgctgcaaggcttcggcgccgacaccgccaccgcgatcaccggaattgcgggtccgagtgggggaacgccggaaaagcctgtgggaacagtgtgcttcaccgtcctgctggacgatggccgaacaaccacccgaaccgtgcggctgcccgggaaccggtcagacattagggagcgctcgacgactgtggcgatgcacctgctgcggcgcaccctgagcggtatcccgggctcaccctag

SEQ ID NO: 273 - DNA, 471 bp, Mycobacterium Tuberculosis
atgcgcttgaagccagccccatctcctgctgcagcctttgccgtcgccggcctgatcctcgcaggctgggccggatccgtgggcctcgccggcgccgatccggagccggcaccgacaccgaagacggcaattgatagcgacggcacctatgcggtggggattgacatcgctcccggcacgtacagctccgcgggacccgtcggcgacggcacctgctattggaagcggatgggtaaccccgatggcgcgctcatcgataacgcactcagcaagaaaccacaggtagtgacgattgagccgaccgacaaggcgttcaagacgcacggctgccaaccctggcagaacacgggcagcgaaggcgctgcccctgccggagttcctggacctgaagcgggggcccaactacaaaatcagctcggcatcctcaacggcttactcggaccgactggagggcgagtgcctcagccctaa

SEQ ID NO: 274 - DNA, 1197 bp, Mycobacterium Tuberculosis
atgacctacggagaggccgtggcggacgtgctcgaattcggtcagagcgagggcgaacccattggcatggctcccgaggagtggcgggcgttcgccgcgcgtgcatcgctgcatgccgcccgggcaaaggccaaggagctgggcgccgatccgccatgggactgcgagctggccaagaccccggagggctactaccagatccgcggcggcataccgtatgcgatcgccaaatcgctggccgcggcaccgtttgccgacattctttggatggagaccaagaccgccgatctcgccgacgctcgacagttcgccgaggcgatccatgccgagttccccgaccagatgctggcgtacaacctctcaccatcgttcaactgggacaccaccggcatgaccgacgaggagatgcggcgcttccccgaggagctcggcaaaatgggcttcgtcttcaacttcatcacctatggcgggcaccagatcgacggtgtcgcggccgaggaattcgccaccgcgctgcgccaggacggcatgctggcgctggctcggttgcagcgcaagatgcgcttggtcgaatctccctatcgcacaccgcaaacgctagtcggcgggccgcgcagtgacgccgcattggctgcctcctccggacgcacggcgaccacgaaggcaatgggcaagggctccacccagcaccagcacttggtgcaaactgaggtgccgcgcaagctgctagaggaatggctggccatgtggagcggtcactaccagctcaaagacaaactgcgcgtacagcttcggccgcagcgggccggctcggaggtgctcgagctcggcatccacggcgaaagcgatgacaagctcgccaacgtgatattccaaccgatccaagatcgccgcggccgcaccatcctgttggtacgcgaccagaacacgttcggtgcggaactacgccaaaagcggctgatgaccctgatccacctctggctcgtccaccgcttcaaggcgcaggcggtgcactacgtcacgcccaccgacgacaacctctaccagacctcgaagatgaagtcgcatggaatcttcaccgaggtcaaccaggaggtgggcgagatcatcgtcgccgaggtgaaccacccgcgcatcgccgaactgctgacgcccgatcgggtggcgctgcggaagttgatcacgaaggaggcgtag

SEQ ID NO: 275 - DNA, 480 bp, Mycobacterium Tuberculosis
atgaagctcaccacaatgatcaagacggcagtagcggtcgtggccatggcggccatcgcgacctttgcggcaccggtcgcgttggctgcctatcccatcaccggaaaacttggcagtgagctaacgatgaccgacaccgttggccaagtcgtgctcggctggaaggtcagtgatctcaaatccagcacggcagtcatccccggctatccggtggccggccaggtctgggaggccactgccacggtcaatgcgattcgcggcagcgtcacgcccgcggtctcgcagttcaatgcccgcaccgccgacggcatcaactaccgggtgctgtggcaagccgcgggccccgacaccattagcggagccactatcccccaaggcgaacaatcgaccggcaaaatctacttcgatgtcaccggcccatcgccaaccatcgtcgcgatgaacaacggcatggaggatctgctgatttgggagccgtag

SEQ ID NO: 276 - DNA, 1110 bp, Mycobacterium Tuberculosis
atggagatcggaatattcctcatgccggcccatccaccggagcgcaccctctacgacgccacccggtgggatctggacgtcatcgagctggccgatcaactcggctacgtggaggcctgggtcggcgaacacttcaccgtgccgtgggagccgatctgcgcccccgatctgctgttggcgcaggcgctgctgcgcacccaacagatcaagctcgccccgggtgcgcacttgttgccctaccatcatccggtcgagttggcccaccgggtggcctatttcgaccacctcgcccagggtcggttcatgctcggcgtgggcgccagcggcatcccgggtgactgggcgctgtatgacgtggacggcaagaacggcgagcatcgcgaaatgacccgggaagcgctggagatcatgctgcgcatctggaccgaggacgagccctgggagcatcgcggaaagtactggaacgccaacggaatcgcgccgatgttcgagggtctgatgaggcgccacatcaagccgtaccagaagccccacccgcccatcggcgtcaccgggttcagcgccggctcggagaccctcaagctcgccggcgaacggggttacatccccatgagtctggacctcaacaccgaatacgtcgccacccactgggacgcggtggaggaaggcgcgctgcgcagcgggcgaaccccggatcgccgcgattggcggctggtgcgggaggtgctggtggccgagaccgatgagcaggcgttccggtatgccgtggacggcacgatgggacgcgccatgcgtgagtatgtgctgccgacgtttcggatgttcggcatgaccaagttctacaaacacaatccgtcggtgcccgacgacgaggtgacaccggagtatctcgccgagaacaccttcgtggtcggctcggtgcagaccgtggtcgacaagctcgaggccacctacgaccaggtcggcgggttcggccacctgctgatcctcgggttcgactacagcgataacccgggcccgtggaaggagtcgttgcggctgctggcccacgaggtcatgcccagactcaacgcccgcctcgccaccaagcccgccaccgcggtggtgtag

SEQ ID NO: 277 - DNA, 1365 bp, Mycobacterium Tuberculosis
atgaggtcggacacgcgcgaggagatctccgcggcgttggatgcctaccacgcctcgttgtcgcgggtgctcgatctcaagtgcgatgcgttgaccaccccggaattgctggcctgtttgcagcgactcgaggtcgaacggcgccgccagggcgccgccgagcacgccttgatcaaccaactcgctgggcaagcctgcgaggaagagctcggcgggacgctgcgcacggcgttggccaaccggctacacatcactcccggtgaggccagccgccgcatcgccgaagccgaagacctcggtgagcgccgcgccctgaccggtgaaccgctgccagcgcagttgaccgcgaccgcggccgctcaacgtgagggcaagatcggccgagaacacattaaggagatccaggccttcttcaaggagttgtccgccgcggtggatctgggtatccgcgaggccgccgaggcccagctggccgaactggccaccagtcggcgtcccgatcacctgcatggcctggccacgcagctgatggactggctgcaccccgacggcaacttttccgaccaggagcgtgcccgcaagcgcggcatcacgatgggtaagcaggaatttgacgggatgtcacgtatcagcggtctgctgaccccggagttgcgggccaccatcgaggcggtgttggccaaactggccgcaccgggggcgtgcaaccccgatgaccagaccccggtcgtggatgacacaccggatgcggacgcggtgcgccgcgacacccgcagccaagcccaacgacaccatgacggtttactggccgggctgcgcgggttgttggcctccggtgagctagggcagcatcgggggttgccggtgaccgtcgtggtgagcaccacgcttaaagagctggaagccgccaccggcaagggggtaaccggtggtggttcgcgggtgccgatgtcggaccttatccggatggcgagcaacgcgcaccactatctggcattgtttgacggcgctaagccgttggcgttgtatcacaccaagcggttagcttccccggcgcagcgaatcatgttgtacgccaaggatcgtggctgctccaggccgggttgcgacgccccggcctaccacagtgaggtccaccacgtaacgccgtggacaaccacccaccgtaccgacatcaacgacctcacgctggcctgcggccccgacaatcgccttgtcgaaaaaggctggaaaacccgcaagaacgccaaaggcgacactgaatggctaccgccggcccacttggaccatggccaaccacgcatcaatcgataccaccaccccgagaaaatcctgtgcgaacccgacgacgacgaaccacattga

SEQ ID NO: 278 - DNA, 513 bp, Mycobacterium Tuberculosis
gtgccgtcgggatgggtgtcgcaccgtctcggcgggtcgcccaagtgcataagtgctttgtcgctgccctccggtaccgtcggagccccgtccaagccggacaacgacgccactcgaggcaggacaagaccaactgtgccgccccctgatccagccgccatgggtacctggaagttcttccgggcatctgtggatggccggccggtattcaagaaggagttcgacaagcttcctgatcaggcccgggccgcgctgatcgtgctaatgcagcggtatctcgtcggcgacctcgccgcagggagcatcaaaccgattcgtggcgacattctggagttgcgatggcatgaggcgaacaaccacttccgggtactgttcttccgctggggccagcatcccgtagcgctgacagcgttctacaagaaccagcagaagactcccaagacgaagatcgagacggccctggaccggcagaaaatctggaaaagagccttcggcgacaccccaccgatctga

SEQ ID NO: 279 - DNA, 1314 bp, Mycobacterium Tuberculosis
atgctgcatctaccgcgccgagtgatcgttcagctggccgtctttaccgtgatcgcggtgggcgtgctggccatcacgttcctgcatttcgtgaggctgccggcgatgcttttcggcgtcggccgctacacggtgacgatggagctggtcgaagccggtgggctgtatcgcaccggcaatgtcacctaccgcggctttgaggtgggccgggtggcagcggtgcggctcaccgacaccggggtgcaagcggtgctggccctgaaatcgggcatcgatatcccgtcggacctcaaggccgaggtgcacagccacaccgcgatcggcgaaacctacgtcgagttgttgccgcgcaacgccgcctcgccgccactgaagaacggcgatgtcattgcgctggccgacacctcggtgccgcccgacatcaacgacctgctcagcgcggccaacaccgcattggaggcaatacctcacgagaacctgcagaccgtcatcgacgagtcgtacaccgcggtggccgggttagggctcgaactttcccggctgatcaagggctcggcggaactggcgatcgatgctcgcgcgaatctcgatccgctggtggcgctgatcgaccgggcaggaccggtgctggattcgcagacccacacctcggatgcgatcgcggcctgggcggcacagctggccgcagtcaccggccaattgcagacacacgactcggcggtcggcgatctcatcgaccggggcggtccggcgttgggggagacgcgccaactgctcgagcggctacaacccaccgtgcccatcctgctggccaacctggtcagcgtcggccaggtcgcactcacctatcacaacgacatcgaacagctgctggtggtgttccccatggccatcgccgccgaacaggccggcatcctggccaacctcaacaccaagcaggcctaccggggccagtatctgagcttcaacctcaacctgaacctgccgccgccgtgcaccaccggctttctgccggcccagcagcggcgcattcccacgttcgaggactacccggatcgcccggccggtgatctgtactgccgggtgccccaggattcgccgtttaacgtgcgcggcgcccgcaacatcccctgtgaaaccgtgccgggcaagcgcgcacccaccgtgaagttatgcgagagcgacgcgccatacctgccgctgaacgacggctacaactggaagggcgaccccaacgccacggtgccgggtttggggtccggccaggacatcccgcagacatggcaaacgatgctgctgccgccgggcagctga

SEQ ID NO: 280 - DNA, 378 bp, Mycobacterium Tuberculosis
gtgcagcgccaatcattgatgccccagcagacccttgccgccggcgttttcgtgggtgcgctgctatgcggtgtcgtgacggcggcggtgccaccacacgcacgcgccgacgtggtcgcctatctggtcaacgtgacggtacgcccgggctacaacttcgccaacgccgacgccgcgttgagttacggacatggcctctgcgagaaggtgtctcggggccgcccttacgcacagatcatcgccgacgtcaaggctgatttcgacacccgcgaccaataccaggcctcgtatctgctcagccaggctgtcaacgaactctgccccgcgctgatctggcagttgcgaaactccgcagtcgacaatcggcgctcgggctga

SEQ ID NO: 281 - DNA, 687 bp, Mycobacterium Tuberculosis
gtgcgcatcaagatcttcatgctggtcacggctgtcgttttgctctgttgttcgggtgtggccacggccgcgcccaagacctactgcgaggagttgaaaggcaccgataccggccaggcgtgccagattcaaatgtccgacccggcctacaacatcaacatcagcctgcccagttactaccccgaccagaagtcgctggaaaattacatcgcccagacgcgcgacaagttcctcagcgcggccacatcgtccactccacgcgaagccccctacgaattgaatatcacctcggccacataccagtccgcgataccgccgcgtggtacgcaggccgtggtgctcaaggtctaccagaacgccggcggcacgcacccaacgaccacgtacaaggccttcgattgggaccaggcctatcgcaagccaatcacctatgacacgctgtggcaggctgacaccgatccgctgccagtcgtcttccccattgtgcaaggtgaactgagcaagcagaccggacaacaggtatcgatagcgccgaatgccggcttggacccggtgaattatcagaacttcgcagtcacgaacgacggggtgattttcttcttcaacccgggggagttgctgcccgaagcagccggcccaacccaggtattggtcccacgttccgcgatcgactcgatgctggcctag

SEQ ID NO: 282 - DNA, 345 bp, Mycobacterium Tuberculosis
gtggtgattagtcgtgccgagatctactgggctgacctcgggccgccatcaggcagtcagccggcgaagcgccgcccggtgctcgtaatccagtcagatccgtacaacgcaagtcgccttgccactgtgatcgcagcggtgatcacgtccaatacggcgctggcggcaatgcccggcaacgtgttcttgcccgcgaccacaacgcgactgccacgtgactcggtcgtcaacgtcacggcgattgtcacgctcaacaagactgacctcaccgaccgagttggggaggtgccagcgagcttgatgcacgaggttgaccgaggacttcgtcgcgtactggacctttga

SEQ ID NO: 283 - DNA, 1326 bp, Mycobacterium Tuberculosis
atggacgagatcgagagccttatcgggctgcggccaaccccgctgacctggccggtcgttatcgccggcgactttctaggcgtgtgggacccaccaccgagtctcccgggggcggctaaccatgaaatatcagcgcctaccgctagaatttcatgcatgttgatcgaacgccgcgacgccgccgcgcggttgcgacgcgcgctacaccgagcgccggtggtgttgcttaccggacctcgtcaagccggcaagaccacccttagccggctggtgggcaagtccgcacccgaatgtacgtttgacgccgaaaatcccgtcgacgcgacacggcttgccgacccgatgttggctttatccggccttagcgggttgatcacgatcgacgaggcgcaacggattccggatctgtttccggtcctacgcgtgctcgtcgacaggcctgtcatgccggcccggtttcttatcctgggtagcgcctcacccgatcttgtcgggctggcgtccgaaagtttggccggacgcgtcgagttggtggagttgtccggcctgacggtccgcgacgtcggatcctcggccgccgatcgcctctggttgcgtgggggtctaccgccctcgttcacggcacgctccaacgaggactccgcggcgtggcgcgacggctacatcaccacgtttctggagcgcgatctcgcccagcttggtgtgcgcattccggccgcgacgatgcggcgcgcgtggacgatgctcgcccactaccatggccagctcttcagcggcgcagaacttgcccgctcactcgacgttgctcagacgacggcgcggcgatacctcgatgcgctcaccgatgcactcgtcgtccgtcagctgacgccctggttcgccaacatcggaaagcgacaacgccgatcacccaagatctacatccgggacaccggtttgttgcacaggttgctcggtatcgacgatcggcttgccctcgaacgcaatccgaagctcggcgcgagctgggaggggttcgtgctcgagcagcttgcggccctgctcgccccgaatccgctgtattactggcgcacccagcaagacgccgaactcgatctctatgtcgaattatctggccgtccctatggattcgagatcaagcggacgtctacaccgtcgatttcccggtcgatgcgctcggctcttgtcgacctccaactggcgaggttggcaatcgtctaccctggcgaacaccgctttcccttgagcgacacggtcgttgcggttcccgcggatcagatcttgaccaccgggagtgtcgatgaacttctcgcgctcttgaaatga

SEQ ID NO: 284 - DNA, 435 bp, Mycobacterium Tuberculosis
atggccaccacccttcccgttcagcgccacccgcggtccctcttccccgagttttctgagctgttcgcggccttcccgtcattcgccggactccggcccaccttcgacacccggttgatgcggctggaagacgagatgaaagaggggcgctacgaggtacgcgcggagcttcccggggtcgaccccgacaaggacgtcgacattatggtccgcgatggtcagctgaccatcaaggccgagcgcaccgagcagaaggacttcgacggtcgctcggaattcgcgtacggttccttcgttcgcacggtgtcgctgccggtaggtgctgacgaggacgacattaaggccacctacgacaagggcattcttactgtgtcggtggcggtttcggaagggaagccaaccgaaaagcacattcagatccggtccaccaactga

SEQ ID NO: 285 - DNA, 996 bp, Mycobacterium Tuberculosis
atgccggacaccatggtgaccaccgatgtcatcaagagcgcggtgcagttggcctgccgcgcaccgtcgctccacaacagccagccctggcgctggatagccgaggaccacacggttgcgctgttcctcgacaaggatcgggtgctttacgcgaccgaccactccggccgggaagcgctgctggggtgcggcgccgtactcgaccactttcgggtggcgatggcggccgcgggtaccaccgccaatgtggaacggtttcccaaccccaacgatcctttgcatctggcgtcaattgacttcagcccggccgatttcgtcaccgagggccaccgtctaagggcggatgcgatcctactgcgccgtaccgaccggctgcctttcgccgagccgccggattgggacttggtggagtcgcagttgcgcacgaccgtcaccgccgacacggtgcgcatcgacgtcatcgccgacgatatgcgtcccgaactggcggcggcgtccaaactcaccgaatcgctgcggctctacgattcgtcgtatcatgccgaactcttttggtggacaggggcttttgagacttctgagggcataccgcacagttcattggtatcggcggccgaaagtgaccgggtcaccttcggacgcgacttcccggtcgtcgccaacaccgataggcgcccggagtttggccacgaccgctctaaggtcctggtgctctccacctacgacaacgaacgcgccagcctactgcgctgcggcgagatgctttccgccgtattgcttgacgccaccatggctgggcttgccacctgcacgctgacccacatcaccgaactgcacgccagccgagacctggtcgcagcgctgattgggcagcccgcaactccgcaagccttggttcgcgtcggtctggccccggagatggaagagccgccaccggcaacgcctcggcgaccaatcgatgaagtgtttcacgttcgggctaaggatcaccggtag

SEQ ID NO: 286 - DNA, 1320 bp, Mycobacterium Tuberculosis
atggtcaataagccgttcgagcggcgcagtctgttacggggtgcgggcgcgcttactgcggcctcgctggctccctgggccgctgggtgtgctgccgatgacgatgacgcgttgactttcttttttgcagccaatccggacgagctccgtccccggatgcgcgtcgtcaacgaattccagcggcgctatcccgatatcaaggtacgggccctgttgtccggacccggcgtcatgcagcagctcgcaacgttttgcgcgggtggcaagtgtccggatgtgctgatggcatgggaactgacctatgccgaactggccgaccggggggtgttgcttgacctgaacacgctattggcgcgcgaccaggctttcgccgcggagctgaaatcggacagcatcggggccctgtatgagactttcacgttcaacggaggccagtacgcctttccggagcaatggtccggcaacttcttgttctacaacaaacagctattcgacgacgccggcgtgccaccgccgcccggtagctgggaacggccatggagcttcgccgaattcctggatgccgcccaggcgcttaccaagcagggccggtcgggacgggacaggcaatggggcttcgtcaacgcgtgggtctcgttctacgctgccgggttgttcgccatgaataacggtgtaccgtggtcggttccgcggatgaatcccacccacctcaatttcgaccacgatgggttcctcgaagcggtgcagttctacgccgacctgaccaacaagcacaaggtggcccccagcgctgctgagcagcagtcgatgtcgacggcggacctgttttctgtgggcaaggccgggatcgcgttggccgggcactggcgatatcagacgttcgaccgtgccgacggtctggacttcgacgtcgccccactgcccatcggtccgcgcggacgagccgcctgttcagatatcggtgtcaccgggctggccattgcggcgaccagtcgacgcaaggaccaggcgtgggaattcgtaaagttcgcgaccggcccggtggggcaggcattgatcggcgaatcccgcctgttcgtgccggtgctgagatcggcgatcaactcgcacggattcgccaacgcccaccgcagggtaggcaatcttgccgtgctcagcgaggggccggcctattcggaaggcttgccggtgaccccggcctgggagaagatcgccgccctgatggaccgctacttcggacccgtgctgcgtggatcccggccggcgacctcgctgaccgggctatcacaggccgtcgatgaagtgctgcgcaatccatga

SEQ ID NO: 287 - DNA, 12456 bp, Mycobacterium Tuberculosis
atggttgatcaactccagcatgcgaccgaagcgctgcgcaaagcgctggtccaggtggaacgcctgaagcgcaccaaccgtgcgttgctggagcgctcgagcgagccgatcgcgatcgtgggcatgtcgtgtcgcttcccggggggcgtcgattccccggaagggctgtggcagatggtggccgacgccagggacgtgatgtcagaatttcccaccgaccgtgggtgggatctggccgggttgttcgacccggatcccgacgtgcgccataagtcgtacgcgcgcactgggggcttcgtggatggcgtcgcggatttcgatcccgcgttcttcggtatttcgcccagcgaggcgttagcgatggatccacagcatcggatgttgctggagttgtcctgggaggcgttggagcgggccggtatcgatccgaccggattgcgcggcagcgccaccggggtattcgccgggctcatcgtcggcggctacggaatgttggccgaggagatcgagggctaccggctgaccgggatgacctccagcgtcgcctcgggtcgggtggcctatgtgctggggttggagggtccggcggtgtcggtggatacggcgtgttcgtcgtcgttggtggcgttgcatatggcggtgggatcgctgcggtcgggggagtgcgatctggcgctggctggcggcgtcaccgtcaacgccacaccgacggtcttcgtggaattcagcaggcatcgtgggctggcacccgacggccggtgcaagccttacgccgggcgggctgatggggtcggctggtccgagggcggtgggatgttggtgctgcagcggctttcggatgcgcggcggttgggtcatccggtgttggcggtggtggtcgggtcggcggttaatcaggatggggcgtcgaatgggttgaccgcgcctaatggtccttcgcagcagcgggtggtgcgggcggcgttggccaatgccgggttgagcgcggccgaggtggatgtggtggaggggcatgggaccgggaccacgttgggggatccgattgaggctcaggcgttgttggccacttatgggcaagatcggggggagccgggagaacctttgtggttggggtcggtgaagtcgaatatgggtcatacgcaggccgcggcgggggtggccggggtgatcaagatggtgttggcgatgcgccatgagctgttgccggcgacgttgcacgtggatgtgcctagcccgcatgtggattggtcggcgggggcggtggagttgttgaccgcgccgcgggtgtggcctgctggtgctcggacgcgtcgtgcgggggtgtcgtcgtttgggattagtggcactaatgcgcatgtgattatcgaggcggtgccggtggtgccgcggcgggaggctggttgggcggggccggtggtgccgtgggtggtgtcggcgaagtcggagtcggcgttgcgggggcaggcggctcggttggccgcgtacgtgcgtggcgatgatggcctcgatgttgccgatgtggggtggtcgttggcgggtcgttcggtttttgagcatcgggcggtggtggttggcggggaccgtgatcggttgttggccgggctcgatgagctggcgggtgaccagttgggcggctcggttgttcggggcacggcgactgcggcgggtaagacggtgttcgtcttccccggccaaggctcccaatggctgggcatgggaatcgaactgctcgataccgcaccggcattcgcgcagcagatcgacgcgtgtgccgaggcgttcgcggaatttgtcgactggtcgctggtggacgtgctgcgtggcgcccccggtgcaccgggactggatcgcgtggatgtggtgcagcccgtgctgttcgcggtgatggtgtcactggccgagctgtggaagtcggtcgcagtgcatccggatgcggtgatcggtcattcgcaaggcgagatcgctgccgcctacgttgccggcgcgctgtcgctgcgcgacgccgcacgggtggtcacgctgcgcagcaagttgctggccggactggccggcccgggcggcatggtgtccatcgcgtgcggtgccgaccaggcgcgggatttgttggcgcccttcggcgatcgggtcagcatcgccgtcgtcaacggcccctcggcggtggtggtgtcgggcgaagtgggcgcgctggaggagctgatcgcggtgtgctccaccaaggaactgcggacccgccggatcgaggtggactatgcctcgcattcggtggaggtcgaggcgatccgtggcccactcgccgaagctctgtccggcatcgaaccgcgatccacgcgtaccgtcttcttctctacggtgaccggaaatcgtttggatacagctggtttggacgccgactactggtaccgcaacgtccgccagaccgtgctattcgaccaggcggtgcgcaacgcctgcgagcagggctaccgcacgttcatcgaatccagcccgcatccggcgttgattaccggtgtcgaggaaacattcgccgcgtgcaccgacggtgacagcgaggccattgtcgtccccacgctggggcgtggagatggtgggctgcaccgattcctgctctcggcggcgtccgcgtttgtggcgggggtggctgtgaactggcggggcacgctggacggagcgggctatgtggagctgccgacgtatgcctttgacaagcgccggttttggctctcggccgagggctcaggcgccgacgtatccggtttggggttgggtgcgagcgaacacccgttgctgggcgcggtggtcgacctgcccgcctccggcggggtggtgttgacgggtcggttgtcgcccaacgtgcagccgtggttggccgaccacgccgtttcagacgtggtgctgttcccgggcaccggattcgtggagctggcgatccgcgccggcgacgaagtcggctgctcggtgcttgacgagctgacgctggccgcacccctgctgttgcccgccaccggctccgttgcggtgcaggtggtagtcgacgctggccgggattcgaattcccgtggtgtgtcgatattttcccgagctgacgcgcaagcgggctggcttttgcatgccgagggtatcctgcggcccgggtcggttgaaccaggcgcggacctatcggtgtggccaccggcaggtgccgtgacggtggacgtggccgatggctatgagcggttggcgacacgcggctaccggtacggaccggcgtttcgcgggctgaccgcgatgtgggcccgcggcgaggaaatattcgccgaggtgaggctgccggaggcggccgggggagtcggtgggttcggtgtgcatccggctttgttggacgccgtcttgcatgcggtcgtgatcgccggcgacccggacgaactcgcattgccgttcgcttggcagggcgtgtcgttgcatgccacgggggcctcggcggtgcgggcccggatcgcgccggcggggccgtcggcggtgtcggtggagttggcggacgggctgggtctgccggtattgtcggtggcctcgatggtggcccgcccggtgaccgagcggcagctgctggcggcggtgtcgggctcgggtcccgaccggctgttcgaagtgatctggtcgcccgcgtcggcggccacgtccccggggcctacccccgcctaccagatctttgaatcggttgcggctgaccaagatccggtagccggcagctacgtgcgcagccaccaggctctggccgcagtgcagtcgtggctgaccgaccatgaatccggggtgctggtggtggcgacccggggcgcgatggcgctgccccgcgaagacgtcgccgatctggcgggcgcggccgtgtgggggctggtgcggtcggcgcagaccgagcatccgggccggatcgtgctggtcgattccgatgcggccaccgacgacgcggcgatcgcgatggcgttggcgactggcgagccgcaggtagtgctgcggggcggacaggtgtacaccgcgcgcgtgcgcggcagccgcgcggcggatgccatcttggtgccgccgggcgatgggccatggcggttgggtctgggcagcgcgggcaccttcgaaaatctgcggctcgagccggttcccaacgccgacgcaccgttggggcccggccaggtccgggtggccatgcgcgccatcgccgcgaacttccgcgacatcatgatcaccctaggcatgttcacccacgacgcgctgctcggcggcgaaggcgcgggcgtggtcgtcgaggtcggccccggtgtcaccgaattctcggtcggtgattcggtgttcggattcttccccgacggcagcggcaccctggtggccggcgacgtccggctgctgctgccgatgcccgccgactggtcctacgccgaagccgccgccatctcggctgtcttcaccaccgcgtactacgcattcatacatttggccgacgtacaaccgggccagcgcgtgttgatccatgccggcaccggcggggtgggcatggcggcggtgcagctggctcggcatctggggttggaggtgttcgcgaccgcgagcaagggtaagtgggacaccttgcgcgccatgggctttgacgacgaccacatatccgattcacgtagcctagagttcgaggacaagttccgcgcggccactggcggtcgagggttcgacgtggtgttggactcgctggccggtgaattcgtggatgcgtcgctgcgtctggtggcaccgggtggggtgttcttggagatgggcaagaccgacatccgcgaccccggcgtgatcgcccagcagtacccgggcgtgcgctaccgcgccttcgacctattcgaaccgggacgtccccggatgcatcagtacatgctggagctcgccacgctgttcggcgatggggtgctgcggccgttgccggtcaccacttttgacgtgcggcgcgcgcctgcggcgttgcgttatctgagccaggcgcgccacaccggcaaggtcgtcatgctgatgcccggctcgtgggcggcgggcacggtgttgatcaccggtggcaccgggatggcgggttcggcggtggcccgtcacgtggtggctcgtcatggggtgcgcaatctggtgttggtgagccggcgcggcccggatgctcccggggctgcggagctggtggccgagttggccgccgccggtgcgcaggtacaggtggtggcctgtgacgcggcggatcgagcggcgttggccaaggtgatcgccgatattccggttcagcatccattgtcgggcgtgatccacaccgccggcgcactcgacgacgcggtggtgatgtcactgacaccggatcgggtggatgtggtgttgcggtccaaggtggacgcggcgtggcacctgcacgagttgactcgcgacctggatgtgtcggcgtttgtcatgttttcgtcgatggccgggctggtcggatcgtcgggccaggccaactatgcggccgccaattcgtttttggatgcgctggccgcccaccggcgggcccatgggctgccggccatctccctgggctggggtctgtgggatcaggccagcgccatgaccggcggcctggacgccgcagacctggcccggctgggtcgtgaaggggtgctggcgctgtccaccgctgaggcgctggaactgttcgacaccgcaatgatcgtcgacgagccattcctggcgcccgcccgcattgacctcaccgcactgcgagcccatgcggtggcggtgccgcccatgttctccgacctagccagcgcgccgacccgccgtcaggtcgacgactccgtggccgccgcaaagtcgaaatcggcgctcgcgcatcgcctgcacgggctgcccgaagccgaacagcacgccgtcttgctaggcctggtgcgtttgcacatcgccaccgtgctgggcaacatcacgccagaagccatcgaccccgacaaggcgttccaggacctgggttttgactcgttgaccgcggtcgaaatgcgtaaccggctcaaatccgccaccggcctttcactttcacccacgctcatcttcgactacccgacacccaatcggctggcctcctatatccgcaccgaacttgccggcctcccacaggaaatcaagcacacacccgcggtacgcaccacgagcgaggatccgatcgcgatcgtgggcatggcgtgccgctatcccggcggggtgaattccccggacgacatgtgggacatgctgatccagggccgcgacgtgctctccgaattcccggcggaccgcgggtgggacctggccgggctatacaaccccgaccccgacgccgcgggtgcgtgctacacccgcaccggcggctttgtggacggggtcggcgacttcgaccccgccttcttcggggtggggccgagcgaggccctcgcgatggatccacagcatcggatgttgctggagttgtcctgggaggcgttggagcgggccggtatcgatccgaccggattgcgcggcagcgccaccggggtattcgccggggtaatgacgcaaggctacggcatgttcgccgccgagccggtagaaggcttccggctgaccggccaattgtccagcgtcgcctcgggtcgggtggcctatgtgctggggttggagggtccggcggtgtcggtggatacggcgtgttcgtcgtcgttggtggcgttgcatatggcggtgggatcgctgcggtcgggggagtgcgatctggcgctggctggcggcgtcaccgtcaacgccacacccgacatcttcgtggaattcagccgctggcgcggattatccccggacgggcgctgcaaggcattcgccgcggcggccgacggcaccggattctccgagggcggtgggatgttggtgctgcagcggctttcggatgcgcggcggttgggtcatccggtgttggcggtggtggtcgggtcggcggttaatcaggatggggcgtcgaatgggttgaccgcgcctaatggtccttcgcagcagcgggtggtgcgggcggcgttggccaatgccgggttgagcgcggccgaggtggatgtggtggaggggcatgggaccgggaccacgttgggggatccgattgaggctcaggcgttgttggccacttatgggcaagatcggggggagccgggagaacctttgtggttggggtcggtgaagtcgaatatgggtcatacgcaggccgcggcgggggtggccggggtgatcaagatggtgttggcgatgcgccatgagctgttgccggcgacgttgcacgtggatgtgcctagcccgcatgtggattggtcggcgggggcggtggagttgttgaccgcgccgcgggtgtggcctgctggtgctcggacgcgtcgtgcgggggtgtcgtcgtttgggattagtggcactaatgcgcatgtgattatcgaggcggtgccggtggtgccgcggcgggaggctggttgggcggggccggtggtgccgtgggtggtgtcggcgaagtcggagtcggcgttgcgggggcaggcggctcggttggccgcgtacgtgcgtggcgatgatggcctcgatgttgccgatgtggggtggtcgttggcgggtcgttcggtttttgagcatcgggcggtggtggttggcggggaccgtgatcggttgttggccgggctcgatgagctggcgggtgaccagttgggcggctcggttgttcggggcacggcgactgcggcgggtaagacggtgttcgtcttccccggccaaggctcccaatggctgggcatgggaatgggattgcacgccggatacccggtgttcgccgaggcgttcaacaccgtagtgggcgaacttgaccggcatctgctgcgcccactgcgcgaagtgatgtggggtcacgacgaaaacctactgaacagcacggaattcgcgcagcccgcgctgttcgcggtggaagttgccctgttccggttgctgggatcctggggtgtacgaccggattttgtcatgggccactcgatcggtgagttgtctgcggcacatgtcgccggtgtcctgtcgttggagaacgctgcggtgttggtggctgcccgcggccggctcatgcaggcgttgccggccggtggggcgatggtcgccgtgcaagccgccgaggaagaggtgcggccgctgctgagcgctgaggttgacatcgctgcggtcaacggtccagcgtcactggtgatttcgggtgcacaaaacgccgtggccgcggtggccgaccagctgcgcgccgacggacgacgagtccaccagctggcggtttcccacgcgttccactcgccgttgatggatccgatgatcgacgaattcgcagccgtcgctgccggaatcgccatcggccggcccaccatcggagtcatctccaacgtgaccgggcagttggcgggcgacgatttcggatcagcggcctactggcgacgtcacatccggcaagccgtgcggttcgccgacagtgtgcgcttcgcgcaggcggccggaggcagccgattcctcgaagtcgggcccagcggtggccttgttgcgtcgatcgaagagtcgttgcccgacgttgcggtgacaacgatgtctgcgctgcgcaaggatcgccccgagccggcgacgttgaccaacgccgtcgcgcaagggtttgtcaccggtatggacctggattggcgcgctgtggtaggcgaggcgcagtttgtcgagttgccgacgtatgccttccaacggcggcggttttggctgtccggtgatggtgtcgcggcggacgcggccggcttggggttggcggccagtgagcacgcgctcttgggcgcggtgatcgatctgccggcctcgggcggggtggtgttgacgggtcggctgtcgcccagcgtgcagggctggttggccgaccactccgttgccggcgtgacgatcttcccgggagcgggatttgtggagttggcgatccgcgccggcgacgaagtgggttgtggcgttgtcgacgaatcaacgctggccgcgccgttggtgttgcccgcatccggttcggtggcggttcaggtggtcgtcaatggtcccgacgagtccggcgtgcgcggggtgtcggtgtattcgcgtggtgacgtcggtaccggctgggtgttgcacgccgagggcgcgctgcgcgccgggtcggcggaaccgaccgcggatctagcgatgtggccgccggcgggcgccgtcccggttgaggtggcggacggctatcagcagctggccgagcgcggatacggctacgggccggcgtttcggggactgaccgcgatgtggcgccggggtgatgaggtgttcgcggaggtggcgttgcccgccgatgccggggtctcggtcaccggcttcggggtgcatccggtgctgctggatgcggccttgcacgcggtggtgttgagcgcggaaagcgccgagcgtggccaaggttcggtgttggtcccgttctcctggcagggggtctcgttgcatgcagcgggggcgtcggcggtgcgggcccgcatcgcgccagtgggtccgtcggcggtgtcgatcgagctggccgatgggttgggattgccggtgttgtcagtcgcttccatgctggcccgaccggtgaccgatcagcaattgcgggcggcggtgtcgagctcgggtccggaccggctattcgaggtcacctggtcgccgcagccatcggccgcggtggagccgctaccggtgtgcgcctgggggacaacggaggactcggcggcggtggtgtttgagtcggtgcctctggccggtgacgtagtggcgggcgtgtatgccgccacgagttcggtgcttgatgtgttgcagtcgtggctaacccgtgatggggcaggggttttggtggtgatgacccgcggtgcggtggcattgccgggcgaagatgtcaccgatttggcgggtgccgccgtatggggattggtgcggtcggcgcagaccgagcatccgggccggatcgtgctggtcgattccgatgcgccgctcgacgattcggccctggcggcggtagtgacgacaggcgagccgcaggtgttgtggcggcgcggggaggtttatacggcgcgggtgcacggtagccgcgcggtgggcgggctgttggttcctccgagtgaccggccgtggcggttggcgatgagcaccgccggcaccttcgagaatctgcggctggagctgattcccgatgccgacgcgccgctgggccccgggcaggttcgagttgcggtgtccgcgattgccgccaacttccgcgacgtcatgatcgcgctgggtctgtatcccgatccggacgcggtcatgggcgttgaggcctgcggcgtcgttatcgaaaccagcttgaacaagggatctttcgcggtcggagaccgggtaatgggcctgttccccgagggcaccggaaccgtcgccagcaccgaccagcggctgctggtcaaggtgccggcggggtggtcgcacacggccgccgccaccacctcggtggtgttcgccaccgcccactacgcgctggtggatttggccgctgctaggtcgggccagcgcgtgttgatccatgccggcaccggcggggtgggcatggcggcggtgcagctggctcggcatctggggttggaggtgttcgcgaccgcgagcaagggtaagtgggacaccttgcgcgccatgggctttgacgacgaccacatatccgattcacgtagcctagagttcgaggacaagttccgcgcggccactggcggtcgagggttcgacgtggtgttggactcgctggccggtgaattcgtggatgcgtcgctgcgtctggtggcaccgggtggggtgttcttggagatgggcaagaccgacatccgcgaccccggcgtgatcgcccagcagtacccgggcgtgcgctaccgcgccttcgacctattcgaaccgggaccggaccgcattgcgcagatccttgccgagctcgccacgctgttcggcgatggggtgctgcggccgttgccggtcaccacttttgacgtgcggtgcgcgcctgcggcgttgcgttatctgagccaggcgcgccacaccggcaaggtcgtcatgctgatgcccggctcgtgggcggcgggcacggtgttgatcaccggtggcaccgggatggcgggttcggcggtggcccgtcacgtggtggctcgtcatggggtgcgcaatctggtgttggtgagccggcgcggcccggatgctcccggggctgcggagctggtggccgagttggccgccgccggtgcgcaggtgcaggtggtggcctgtgacgcggcggatcgagcggcgttggccaaggtgatcgccgatattccggttcagcatccattgtcgggcgtgatccacaccgccggcgcactcgacgacgcggtggtgatgtcactgacaccggatcgggtggatgtggtgttgcggtccaaggtggacgcggcgtggcacctgcacgagttgactcgcgacctggatgtgtcggcgtttgtcatgttttcgtcgatggccgggctggtcggatcgtcgggccaggccaactatgcggccgccaattcgtttttggatgcgctggccgcccaccggcgggcccatgggctgccggccatctccctgggctggggtctgtgggatcaggccagcgccatgaccggcggcctggcgacggtggacttcaaacgcttcgcccgcgacggcatcgtggcgatgtcgtctgctgacgccctgcaattgttcgacaccgcaatgatcgtcgacgagccattcatgctgcccgcccacatcgactttgcggcgttgaaggtcaagttcgatggcggcacgttgccgccgatgttcgtcgatctgatcaacgcgccgaccaggcgccaggtcgatgactcgttggccgcggcgaaatcgaaatcggctctgctgcaacgcctggaaggactgcccgaagacgagcaacacgccgtcctgctggacctggtgcgctcgcacatcgccaccgtgctgggtagcgccagccccgaagccatcgacccggatagggcattccaggagttgggtttcgactcgctcaccgcggtcgaaatgcgcaaccggctcaaatccgccaccggcctggcgctttcacccacgctcatcttcgactaccccaactccgcggcgctggccggctatatgcgtcgagaactgctcggctcatcaccgcaagacacttcagccgtggcggccggggaagccgaactacaacgcattgtggcgtccattccggtcaagcgcttacggcaggcgggagtgctggatctgttgctcgcgctggcaaatgaaaccgaaaccagcggccaggacccggcgttggcgccgaccgcagaacaagagatcgcggacatggacctcgacgacctggtcaacgcggcgtttcggaacgacgacgagtag

SEQ ID NO: 288 - DNA, 336 bp, Mycobacterium Tuberculosis
atggctgatcgtgtcctgaggggcagtcgcctcggagccgtgagctatgagaccgaccgcaaccacgacctggcgccgcgccagatcgcgcggtaccgcaccgacaacggcgaggagttcgaagtcccgttcgccgatgacgccgagatccccggcacctggttgtgccgcaacggcatggaaggcaccctgatcgagggcgacctgcccgagccgaagaaggttaagccgccccggacgcactgggacatgctgctggagcgccgttccatcgaagaactcgaagagttacttaaggagcgcctcgagctcattcggtcacgtcggcgcggctga

SEQ ID NO: 289 - DNA, 165 bp, Mycobacterium Tuberculosis
atggcgcgcaccgacatccggccgattgtgaagctgcgttccacggcgggcaccggctacacctacaccacccgcaagaaccgccgtaatgaccccgaccgtctcatcttgcgcaaatacgacccgatcctgcggcgtcacgtggactttcgcgaggaacgctga

SEQ ID NO: 290 - DNA, 414 bp, Mycobacterium Tuberculosis
gtggcgatggtcaacaccactacgcggcttagtgacgacgcgctggcgtttctttccgaacgccatctggccatgctgaccacgctgcgggcggacaactcgccgcacgtggtggcggtaggtttcaccttcgaccccaagactcacatcgcgcgggtcatcaccaccggcggctcccaaaaggccgtcaatgccgaccgcagtgggcttgccgtgctcagccaggtcgacggcgcgcgctggctctcactggagggtagggcggcggtgaacagcgacatcgacgccgtgcgcgacgccgagctgcgctacgcgcagcgctatcgcaccccgcgtcccaatccacgccgagtggtcatcgaggtccagattgagcgcgtgctgggatccgcggatctgctcgaccgggcctga

SEQ ID NO: 291 - DNA, 441 bp, Mycobacterium Tuberculosis
atgtttgcgaacgccgggttgtcgccgtttgtcgcgatttggaccgcccgcgctgccagtttgtacacctcgcataacttttggtgcgcggcggcggtttctgctgcggtgtatgtcggctcggcggtcgttccagcggcggtggctggaccgctgttcgtcgggcgcgtcagtgccacgattaaagctgcggcacccagcacaaccgcggcaatcgcgacgctggccaccgccgccaacggccaattgcgtgaacgcggcggcgctggggggtgggttggtgtccattgtcctgtggtgggtggggggggtgttggtcacccgcgtaaggctattgcagctgccgtgtctgtgcactccacctgcatgccagcagcgtttggtggccaccttggcctgggcgaccgcagtaggtcggtttcgttgtcggggacgccgtag

SEQ ID NO: 292 - DNA, 2721 bp, Mycobacterium Tuberculosis
gtgactgagctggccgagctggaccggttcaccgcggaactaccgttctcgctcgacgactttcagcagcgggcttgcagcgcgctggaacgcggccacggtgtgctggtgtgcgcgccgaccggcgctggcaagacggtggtcggcgagttcgccgtgcacctggcgctggcggccggcagtaaatgtttctacaccacgccgctgaaagccctgagcaaccaaaagcacaccgatctcacagcacgctacggccgtgaccagatcgggctgctgaccggtgacctgtcggtcaacggcaacgcgccggtggtggtgatgaccaccgaagtgctgcgcaacatgctctacgcggattcgcctgcgctgcaggggctttcctatgtggtgatggatgaggtgcatttcctcgccgaccggatgcggggtccggtgtgggaggaggtgatcctgcaactgcccgacgacgtgcgggtggtcagcctgtcggcgacggtgagcaacgccgaggagttcggcggttggatccagacggtgcggggcgacaccacggtggtggtcgacgagcatcggccggtgccgttgtggcaacacgtcttggtgggcaagcgcatgttcgacctgttcgattaccggatcggcgaagccgaagggcagccccaagtcaaccgcgagttgctgcgccacatcgcgcatcgccgtgaggccgaccggatggccgattggcagcctcggcgccgaggctcgggccggcccggcttctaccggccacccggccgacccgaggtgatcgccaaactcgacgctgaagggctgttgccggcgatcaccttcgtgttctcccgggccggttgtgacgccgcggtcacccaatgcctgcggtcaccgctgcggttgaccagcgaagaggagcgcgcacggatcgccgaggtgatcgaccaccgctgcggtgacctggccgactccgacctggcggtactcggctactacgaatggcgggaagggttactgcgcggtctggccgcccaccacgcgggcatgttgccggccttccggcacacggtggaggagctgttcaccgccggtttggtcaaggctgtattcgccaccgagactctggcgctcggtatcaacatgccggcccgcacggtggtgctggagcggctggtgaagttcaacggtgagcagcacatgccgctgacgccgggggagtacacccaactgaccggtcgcgccggccggcgcggtatcgacgtcgagggtcacgcggtggtgatctggcacccggaaattgaaccgtccgaggtggcgggcctggcctccacccgcacctttccgctgcgcagctcgtttgccccgtcgtacaacatgacgatcaacctggtgcaccggatgggtccgcaacaggcgcaccgactgctcgagcagtcgttcgcccaatatcaggccgaccgatccgtggtcggactggtccgcggaattgagcggggcaacaggatactcggcgagatcgcagccgaactgggcggatctgatgcgcccatcctcgaatacgctcgattgcgcgcgcgggtgtccgagctggaacgtgcgcaggcccgcgcgtcgcggttacagcgacggcaggcggccaccgatgcgctggccgcgctgcgccgcggtgacatcatcaccatcacccacggccgccgcggtggtctggccgtcgtcctggaatcagcccgcgaccgcgacgacccgcgtccgctggtgctaaccgaacaccgatgggcgggacggatctcctcggccgactactcgggcacgacgccggtggggtcgatgacgctgcccaagcgggtggagcaccgccagccgcgggtccggcgtgacctggcctcggcgctgcgatcggcagccgcgggtctggttattccagccgcccggcgcgtcagcgaggccggcgggtttcacgatccggagctggagtcgtcgcgcgaacaattgcgccgtcatccggtgcatacctcgcccgggctcgaggaccagatccgccaggccgagcgttacttacgcatcgaacgcgacaacgcgcaattagagaggaaggtcgccgccgccaccaactcgttggcccgcacgttcgaccgattcgtcgggctgctcaccgaacgggagttcatcgatggcccggccactgatcccgtggtcaccgacgacggccggctgctggcgcggatttacagcgagagcgacctgttggtggccgagtgcctacgtacaggtgcgtgggagggtttaaagccggccgaattggcgggggtggtgtcggcggtggtctacgagacgcgcggtggtgacggccagggcgccccgttcggagccgatgtgcccacaccgcggttacggcaggctctgactcagacatcaaggctgtccacgacattgcgcgccgacgagcaggcacaccgcatcaccccgagtcgcgaacccgacgatggctttgtcagagtcatctaccgctggtcgcgaaccggtgatctagcggcggcattggccgctgccgacgtgaacggcagcggatcaccgttattggcaggggatttcgtgcgttggtgccgtcaggtgctcgatctgctggaccaagttcgtaacgctgcgcccaaccccgaactgcgggctaccgcaaagcgcgctatcggtgacattcggcgcggcgtcgtcgcggttgacgccgggtag

SEQ ID NO: 293 - DNA, 927 bp, Mycobacterium Tuberculosis
gtgcgcgccgccggtcttctcaaacggctcaacccacgtaacaggcgcagccgcgtcaatcctgacgcgacgatgtcgctggtcgaccacctgaccgagttacgcaccaggttgctgatctccctggccgcgatcttggtcaccacaatcttcgggttcgtctggtattcgcattcgattttcgggttggacagcctcggagagtggctgcggcatccctactgtgccctgccgcagtcggcccgggcggatatcagcgccgacggagagtgccgtttgttggccaccgcgccgttcgaccagttcatgttgcggctcaaggtcgggatggccgccggcattgtgctggcttgcccggtgtggttctaccagctgtgggcgttcatcacgcctggtctctaccagagggagcgccgcttcgcggtggccttcgtgatcccagcagcggtgctgttcgtcgccggtgccgtactggcctacctggtgttgtccaaggcgttgggctttttgttgaccgtcggcagcgacgtgcaggtgaccgcgctgtctggcgaccgctactttggctttctgctcaacctgctggtggtgttcggggtcagcttcgaattccccctgctgatcgtgatgctgaacctggcgggcctgctgacctatgagcggctcaagtcttggcggcgcgggttgatctttgcgatgttcgtcttcgcggcgatcttcacgcccggatccgatccgttctcgatgaccgcgctcggtgcggcgttgaccgtgctgctagagctcgccattcagatcgcccgcgtgcatgacaagcgaaaagccaagcgcgaagccgcgattcccgacgacgaagcttcggtcatcgacccgccctcgccggtgccggcgccatcggtcatcggatctcatgacgacgtcacgtag

SEQ ID NO: 294 - DNA, 252 bp, Mycobacterium Tuberculosis
gtgggcagtctgagtccgtggcattgggcgatcctcgctgtcgtggtgatcgtgttgttcggtgccaagaagctccccgatgcggcgcgctcgttgggcaagtcattgcgaatctttaagtccgaggtccgtgaactgcagaacgagaacaaagcggaagcgtctatcgagacccccacgccggtgcaatcgcagcgtgtcgacccctcagcggcgtctggtcaagacagcaccgaggctcggccggcttag

SEQ ID NO: 295 - DNA, 297 bp, Mycobacterium Tuberculosis
atgtcctttgtgaatgtagacccatttgggatgttggcggcagctgcgacactggagtcccttggttcccacatggcggtaagcaatgccgcggtggcctcggtgaccaccaaggttcctcccccggccgccgactacgtatcaaaaaagttatcgctgttctttagtagccacgggcagcagtaccaggtgcaagccgctcggggcacggcctttcatcgaaaattggtccggaccctggcgaatggcgcgcttgcgtatgaggaagtcgagatcgccaacaacgaaggtttctaa

SEQ ID NO: 296 - DNA, 732 bp, Mycobacterium Tuberculosis
atgcccaatttctgggcgttgccgcccgagatcaactccacccggatatatctcggcccgggttctggcccgatactggccgccgcccagggatggaacgctctggccagtgagctggaaaagacgaaggtggggttgcagtcagcgctcgacacgttgctggagtcgtataggggtcagtcgtcgcaggctttgatacagcagaccttgccgtatgtgcagtggctgaccacgaccgccgagcacgcccataagaccgcgatccagctcacggcagcggcgaacgcctacgagcaggctagagcggcgatggtgccgccggcgatggtgcgcgcgaaccgcgtgcagaccacagtgttgaaggcaatcaactggttcgggcaattctccaccaggatcgccgacaaggaggccgactacgaacagatgtggttccaagacgcgctagtgatggagaactattgggaagccgtgcaagaggcgatacagtcgacgtcgcattttgaggatccaccggagatggccgacgactacgacgaggcctggatgctcaacaccgtgttcgactatcacaacgagaacgcaaaagaggaggtcatccatctcgtgcccgacgtgaacaaggagagggggcccatcgaactcgtaaccaaggtagacaaagaggggaccatcagactcgtctacgatggggagcccacgttttcatacaaggaacatcctaagttttga

SEQ ID NO: 297 - DNA, 747 bp, Mycobacterium Tuberculosis
gtgagttttccgtatttcatctcgcctgagcaggcgatgcgcgagcgcagcgagttggcgcgtaagggcattgcgcgggccaaaagcgtggtggcgctggcctatgccggtggtgtgctgttcgtcgcggagaatccgtcgcggtcgctgcagaagatcagtgagctctacgatcgggtgggttttgcggctgcgggcaagttcaacgagttcgacaatttgcgccgcggcgggatccagttcgccgacacccgcggttacgcctatgaccgtcgtgacgtcacgggtcggcagttggccaatgtctacgcgcagactctaggcaccatcttcaccgaacaggccaagccctacgaggttgagttgtgtgtggccgaggtggcgcattacggcgagacgaaacgccctgagttgtatcgtattacctacgacgggtcgatcgccgacgagccgcatttcgtggtgatgggcggcaccacggagccgatcgccaacgcgctcaaagagtcgtatgccgagaacgccagcctgaccgacgccctgcgtatcgcggtcgctgcattgcgggccggcagtgccgacacctcgggtggtgatcaacccacccttggcgtggccagcttagaggtggccgttctcgatgccaaccggccacggcgcgcgttccggcgcatcaccggctccgccctgcaagcgttgctggtagaccaggaaagcccgcagtctgacggcgaatcgtcgggctga

SEQ ID NO: 298 - DNA, 1830 bp, Mycobacterium Tuberculosis
atgggtgagtcagagcgttctgaggcattcggcatcccccgggatagcccgctgtccagtggtgatgccgccgaattagaacagctgcggcgcgaggctgcggtcctgcgcgagcaacttgagaacgccgtcggatcacatgccccgacgcgctctgcccgcgatatacatcaactcgaagcccgtatcgactcacttgctgcccgcaattccaaattaatggaaactcttaaagaagcccgtcaacaactgctggcgctgcgcgaggaagttgaccggctggggcagccgcccagtggctacggcgtcctgctggccacgcacgacgacgacacggtcgatgtgttcacatcgggtcgcaagatgcgcctgacgtgctcaccgaatattgacgctgcatcgctgaagaaggggcagacggtccggctcaacgaggccctgaccgtcgtggaggccggcacattcgaggcggtcggcgagatatccaccttgcgcgagatcctggccgacggtcatcgggctctggtcgtcggccacgccgacgaggaacgcgttgtttggctggctgatcccctgatcgccgaggacctgccagacggcctccctgaggccctcaacgatgacacccggccgcgcaagctgcgccccggcgactcgctgctggtcgacaccaaagccggctatgccttcgaacgcatccccaaagccgaggtagaagacctggtgctggaagaggtgccggacgtcagctacgccgacatcggcggtctgagccgccagatcgagcagatccgcgacgccgtggagctgccgttcctgcacaaggagttgtaccgggagtactcgctgcgcccgcccaagggtgtgttgctctatggcccacccggctgtggtaagacgttgatcgccaaggctgtggccaactcgttggccaagaaaatggccgaggtccgcggcgacgatgcccacgaggcgaagtcgtacttcctcaacatcaagggccccgagctgctgaacaaattcgtcggggaaacggaacgccacatccggctgatcttccaacgggcccgcgagaaggcgtcggaaggcactccggtgatcgtgtttttcgacgagatggactcgatctttcgcacccgtggcaccggcgtttcctcggacgtcgagaccacggtggtcccgcagctgctcagcgagatcgacggggtggagggactcgagaatgtcatcgtgatcggcgcctccaaccgagaggacatgatcgaccctgccatcctgcggcccgggcgcctcgacgtgaagatcaagatcgagcggcctgatgccgaagcggcgcaggacatctactcgaagtacctgaccgagttcttgccggtgcacgccgacgatctcgccgagttcgacggtgaccgttcggcctgcatcaaggcgatgatcgagaaggttgtcgaccggatgtatgccgagatcgacgacaaccggttcctggaggtcacctatgccaacggcgacaaggaagtcatgtacttcaaggacttcaactccggggcgatgatccagaacgtcgtcgaccgagccaagaagaacgccatcaaatcggtgctggagaccggccaaccgggactgcgtatacagcatctgctcgattcgatcgtcgacgagttcgccgagaacgaggatttgcccaacaccaccaaccccgatgactgggcgcggatctcgggcaagaagggggagcggatcgtctacatccgcaccctggtcaccggaaagagttcgtcggccagcagggctattgataccgagtccaacctcggccagtacctgtag

SEQ ID NO: 299 - DNA, 570 bp, Mycobacterium Tuberculosis
atgcgccgaaacatccgtgtaaccctgggcgccgccaccatcgtggcggcgttagggctctccgggtgttcacaccctgagttcaagcgttcgtcgccgcctgccccgtcactgccgcccgtcacgtcgagcccgctcgaggccgcgccgatcacgcccctgcccgcacccgaagccctgatcgatgtgctgtcccggctcgccgacccggccgtgccgggcaccaacaaggtgcagctcatcgagggcgcgacccccgaaaacgccgctgccctggacaggttcaccaccgcactgcgtgacgggagctacttgcccatgaccttcgcggccaacgacatcgcatggtcggacaacaagccgtccgacgtgatggccaccgtcgtcgtcaccactgcccatccggacaaccgcgagttcacgtttcccatggaattcgtgtccttcaagggcggctggcaattgtctaggcagaccgcggaaatgctgctggccatgggtaactcaccggattcgactccgtcggctaccagcccggcgccggccccatcaccgactccccctggctga

SEQ ID NO: 300 - DNA, 282 bp, Mycobacterium Tuberculosis
gtgcaacaatcgctggccgtgaagaccttcgaggatctgttcgccgaactcggcgatcgtgcccgcacccggccggccgacagcaccacggtggcggcattggacggcggggttcatgctctgggtaagaagcttctcgaggaggccggcgaggtgtggctggctgccgagcacgaatccaacgacgcactggcggaggagatcagccagttgctgtactggacgcaggtgctgatgatctcccgtggactgtccctcgacgacgtctatcgaaagctgtga

SEQ ID NO: 301 - DNA, 1470 bp, Mycobacterium Tuberculosis
ttgagcgcggcctcacagcgtgtcggcgccttcggcgaagaggccggctatcacaaaggcctcaagccccgacaactgcagatgatcgggatcggcggcgcgattgggaccggcctgttcctcggcgccggcggccggcttgccaaggccggacctgggttgttcttggtgtacggcgtgtgcggggtttttgtcttcctgatcctgcgggcgctgggtgagctggtgctgcaccgtccgtcgtcaggctcgtttgtgtcgtatgcacgtgaatttttcggcgagaaggccgcttacgcggtgggctggatgtacttcctgcactgggcgatgacgtcgatcgtggacaccaccgcgatcgccacctacttgcagcgttggacgatcttcacggtggtcccgcaatggattcttgccctgatcgccttgacggtggtgttgtcgatgaacctgatttcggtcgaatggttcggcgagctggagttttgggccgcgctgatcaaggttctcgcgctgatggcgttcctagtggtgggaaccgtttttttggccgggcgataccccgtcgacggccacagcaccggattgagcttgtggaacaaccatggcgggctgttcccgacaagctggctgccgctgctgatcgttacctcgggagtggtgttcgcgtactcagcagtcgaattggtagggacggcggccggggagaccgccgagccggagaagatcatgccgcgggcgatcaattcggtggtcgctcgcatcgcgatcttttatgtcgggtcggtggccctgctagcgctgttgctgccgtataccgcctacaaggccggcgagagcccgttcgtcacgttcttttccaaaatcggtttccacggtgccggtgacttgatgaacatcgttgtgcttaccgccgcgctgtcgagcctgaacgcggggctgtattcgaccggccgcgtcatgcattcgatcgcgatgagcggcagcgccccaaggttcaccgcgcgaatgtcgaaaagcggtgtgccctacggcgggatcgtgttgaccgcggtcatcaccctgttcggtgtcgcgctgaacgccttcaagcccggtgaagccttcgagattgtgctcaacatgtccgcgctgggcatcatcgcgggttgggccaccatcgtgctgtgtcagcttcgacttcacaagctggccaacgccgggatcatgcagcggccgcggttccgcatgcccttctccccctacagcggctacctcaccttgctcttcttgcttgtcgtgctggttacgatggcgtccgacaaaccgatcggcacctggacggtggcgacactgattattgtcattccggccctgaccgcaggctggtacctggtacgcaagcgtgtcatggccgtcgcccgcgaaaggctgggtcataccgggccatttccggcggtcgccaacccgcccgtgaggtcaagagactga

SEQ ID NO: 302 - DNA, 882 bp, Mycobacterium Tuberculosis
atgacatcgctgcaaggcaaggtcgtcttcattaccggtgctgcccggggaatcggggctgaggtcgcccgtcggctgcacaacaagggcgccaaactggtgctgaccgacctgagcaaatcagagctggcggtgatgggcgccgaactcggcggcgacgaccgcctactcaccgtggtagccgacgtgcgcgacctgcccgccatgcaggccgcagccgagacggccgtcgaacgattcggcggcatcgacgtcgtcgtggccaacgccggcatcgccagctacggctccgtgctgaaggtcgacccgcaggcgttccggcgggtgttggacgtcaatttgctgggtaacttccacacggtgcgggcgacgttgcccgcgctgatcgaccgccgcggttacgtattgatcgtctcgtcgcttgccgcgttcgcggcgccgcccgggatggcgccctacaacatgtcgaaggcgggtaacgagcacttcgccaacgcgttgcgactcgaggtcgcacacctgggcgtcagcgtcggctcggcgcacatgtcgtggatcgacaccgcgttggttcgcgataccaaggccgacctgcctgcgttcgccgaattgctggcgcgcctcccttggccgttgaacaagaccacgtcggtcaacaagtgtgcggccgcattcgtcaacggcattgagggccgaaaagatcgcgtgtactgcccgggctgggtggccctgttccgttggctcaagccgttgttgtccacccgggtaggccaacgtcccatccgcaacaccgttgccaagctgatgccccagatggatgccgaggtcgccgcgctcggccgctttgccagcgcctacaccgaatcactcgagaattcctag

SEQ ID NO: 303 - DNA, 1077 bp, Mycobacterium Tuberculosis
ttgctaacagggaataaaccagcagttcaacgccgcttcatcggcctgttgatgttgtcagtcctggtcgcaggctgttcttcgaacccgctggctaacttcgcacccgggtatccgcccaccatcgaacccgcccaaccggcggtgtcaccgcctacttcgcaagacccggccggtgcagtgcgaccactgagcggccacccccgggcggcactattcgacaacggcacccgccaattggtggctctgcgcccgggcgccgattcggcggcacccgccagcatcatggtcttcgatgacgtgcacgttgcaccgcgcgtcatttttctgccgggcccggcagccgcgttgaccagcgacgaccacggcacggccttccttgccgcccgcggcggctacttcgtggccgacctgtcctccggtcacaccgcacgagtgaatgtcgctgacgcagcgcacaccgatttcaccgcgatcgcccgccgctccgacggcaagctggtgctgggcagcgcagatggcgccgtctacacgcttgccaagaaccccgcagttgacccggcgtccggcgccgccaccgtagccagccggaccaagatcttcgcgcgcgtggatgcccttgtaacacaagggaatacaaccgttgttctggatcgtggccagacctcggtgaccacgatcggcgccgacggtcatgcccagcaggcactgcgcgccggccaaggtgcgacgaccatggccgccgatccgctgggccgggtgctgatcgccgacacccgtggtggccaactactggtgtacggcgtcgacccgctgatcttgcgccaggcctacccggtgcggcaggctccgtacgggctggccggatcccgcgaattggcgtgggtgtcccaaaccgcgtccaacaccgtcattggttacgatctgaccaccggaatacccgtagagaaggtgcgttacccaaccgtgcaacaacccaactcgttggccttcgacgaaacgtcggacaccttgtacgtggtgtcgggatccggtgccggggtccaggtcatcgaacacgcggcgggcacccgatga

SEQ ID NO: 304 - DNA, 1074 bp, Mycobacterium Tuberculosis
atgtatcccctggtgcgtcggctgttgttcctgatcccacccgagcacgcgcacaagttggttttcgccgtgctgcgcggcgtggccgccgtggcgccagtgcgccggctcttgcgccgactgctgggcccgacggatccggtgctggccagcacggtgttcggggtgcgcttcccggcaccgctcgggctggccgcggggttcgacaaggacggcaccgcactatccagttggggtgcgatggggttcggctacgccgagatcggcaccgtcaccgctcatccgcagcccggcaacccggccccccgcctgttccggctggccgacgaccgcgccctgctgaaccggatggggttcaacaatcacggtgcccgggcactggcgatccgactcgcgcggcaccgacccgagatcccgatcggggtgaatatcggcaagaccaagaaaacgccggccggcgacgcggtcaacgactaccgggccagcgcccggatggtcggcccgctggcgtcgtatctggtggtcaacgtcagctctccgaacacaccggggttacgcgatctgcaggcggtcgaatcgctgcggcccatcctgtctgccgtccgcgccgagacttcgacgccggtgctggtgaagatcgcgccggacttgtccgattccgacctcgacgacatcgcggacctggccgtcgagctagacctggccggcatcgtggcaaccaacaccacggtgtcacgcgacggcctgaccacaccgggggtcgaccggttgggtcccggcggcatctcggggccaccgctggctcagcgcgcggtccaggtgctgcgtcggctctatgaccgggtcggtgatcgattggcgctgatcagcgtgggcgggatcgagacggccgacgacgcgtgggagcgcatcacagcgggcgcatcgctgctacagggctataccggcttcatctacggcggggaacggtgggccaaggacatccatgaaggcattgcccgcaggctgcatgacggcgggttcggctcgctgcacgaagcggtcggctcggcaagacgtcggcaacccagctaa

SEQ ID NO: 305 - DNA, 531 bp, Mycobacterium Tuberculosis
atgacaacttcacccgacccgtatgccgcgctgcccaagctgccgtccttcagcctgacgtcaacctcgatcaccgatgggcagccgctggctacaccccaggtcagcgggatcatgggtgcgggcggggcggatgccagtccgcagctgaggtggtcgggatttcccagcgagacccgcagcttcgcggtaaccgtctacgaccctgatgcccccaccctgtccgggttctggcactgggcggtggccaacctgcctgccaacgtcaccgagttgcccgagggtgtcggcgatggccgcgaactgccgggcggggcactgacattggtcaacgacgccggtatgcgccggtatgtgggtgcggcgccgcctcccggtcatggggtgcatcgctactacgtcgcggtacacgcggtgaaggtcgaaaagctcgacctccccgaggacgcgagtcctgcatatctgggattcaacctgttccagcacgcgattgcacgagcggtcatcttcggcacctacgagcagcgttag

SEQ ID NO: 306 - DNA, 357 bp, Mycobacterium Tuberculosis
atgctgatcattgcgctggtcttggccctgattgggctcctggccttggtgttcgcggtggtcaccagcaaccagctagtggcctgggtatgcatcggggccagcgtgctgggtgtggcgttgctgatcgtcgatgcgttgcgagaacgccagcaaggtggcgcggacgaagctgatggggctggggaaacgggtgtcgcggaggaagccgacgtcgactacccggaggaagcccccgaggagagccaagccgtcgacgccggtgtcatcggcagtgaggagccatcggaggaggccagcgaagcgaccgaggagtcggcggtatcggcggaccgaagcgacgacagcgccaagtag

SEQ ID NO: 307 - DNA, 726 bp, Mycobacterium Tuberculosis
gtgaatagtcactgtagtcacaccttcatcacagacaacagatctcccagggctagaaggggtcacgcaatgagcacactgcacaaggtcaaggcctacttcggtatggctcccatggaggattacgacgacgagtactacgacgaccgcgctccctcgcgcgggtatgcgcggccccgattcgacgacgactacggccgctacgatgggcgcgactacgacgacgcgcgcagcgattcacgcggtgacctgcgcggtgagccggccgactatccaccaccgggatatcgcggcgggtacgcggacgaaccacgtttccggccccgggagttcgaccgcgcggagatgacacggccgcgcttcggatcgtggctgcgcaactccacccgcggcgcgctagcgatggacccccgccggatggcgatgatgttcgaggatggccatccgctctcgaagatcaccacgctgcggcccaaggactacagcgaggctcgcaccatcggtgagcggttccgcgacggcagcccggtcatcatggatctggtgtcgatggacaacgccgatgccaagcggctggtcgatttcgcggccggcctggccttcgcgctgcgcggctcgttcgacaaggtcgcgaccaaggtgttcctgctctcgcctgcagacgtcgatgtgtcccccgaggagcgccgcaggatcgccgaaaccgggttctacgcctaccaatag

SEQ ID NO: 308 - DNA, 945 bp, Mycobacterium Tuberculosis
atgacggaacacaacgaggacccacagatcgagcgcgtggccgacgacgccgccgacgaggaggcggttacggagccgttggccaccgaatcgaaggacgaaccggccgagcacccagaattcgaagggccgcgtcggcgcgcccgccgcgaacgtgccgaacgtcgcgccgcgcaggctcgagctaccgcgatcgagcaggctcgccgcgcggccaaacggcgagcccgcgggcagatcgtcagtgagcagaaccccgccaaaccggccgcccgaggtgttgttcgagggctgaaggcgctgctcgcgacggtcgtgctggccgtcgtcgggatcgggcttgggctcgcgctgtacttcacgccggcgatgtcggcccgcgagatcgtgatcatcgggatcggggcggtgagccgcgaggaggttctcgacgccgccagagtgcggccggcaacgccgttgctgcagatcgacacccaacaggttgctgaccgagtggccacgatccggcgggtggccagtgcgcgggtgcagcggcagtacccgtcggccttgcggatcaccatcgtcgagcgggtcccggtggtggtcaaggatttttcggacggcccgcacctttttgaccgcgacggcgtcgacttcgcgaccgatccgccaccgccggcgttgccttatttcgatgtggacaatcccggtcctagcgatccgacgaccaaggcggcgctgcaggtgttgaccgcgctgcatcctgaagttgcaagccaggtggggcggatcgcggccccgtcggtggcctcgatcaccctgacgttggccgatggccgcgtggtgatctggggaaccaccgaccgctgcgaagagaaggccgaaaagctggcggcgctgttgacccagccaggcagaacgtacgacgtgtccagccccgacctgccgaccgtgaaatag

SEQ ID NO: 309 - DNA, 1233 bp, Mycobacterium Tuberculosis
gtgaaggacacggtcagccagccggccggcgggcgcggggcaacggcgccccggcccgccgatgccgcctcgccgtcttgtggttcctcgccgtctgctgattccgtgtcggtcgttctcgccggcggcgggaccgccgggcacgtcgagcccgccatggccgtcgccgacgccttggtcgcgttggatccgcgcgtccggattaccgcgttgggcaccctccgtggactagagaccaggctggtgccccagcgcggctaccacctggagctgatcacggcggtgccgatgccgcgcaagcccggcggcgacctggcccggctgccgtcgcgggtgtggcgcgccgtccgggaggcccgggacgtgctcgacgatgtcgacgccgacgtcgtcgtcggtttcggtgggtacgtcgcgctaccggcttacctagccgctcgcggcctgcctttgccgccccggcgccggcgccggatcccggtggtgatccacgaagccaacgccagggcgggactggccaaccgggtcggcgcccataccgcggaccgggtgctctccgcggtgccggattccgggctgcggcgcgccgaggtggttggggtcccggtccgtgcgtcgatcgccgcgctggaccgcgcggtgctgcgagccgaggcgcgggcacacttcggcttccccgacgacgcgcgggtgctgctggtgttcgggggttcgcagggcgcggtctcgctcaaccgggcggtgtccggcgccgccgccgacctggccgccgccggtgtttgcgtgctgcatgcccatggaccccagaacgtgctggagttgcgccgtcgggctcaaggtgacccaccgtacgtggcggtgccctatttggaccggatggagctggcctacgccgccgccgatctggtgatctgccgggccggggcgatgacggtcgccgaagtatccgccgtcggtctgccggccatctacgtgccgctgccgatcggcaacggtgaacagcggctgaatgcgttgccggtagtcaatgccggcggcggcatggtggtcgccgacgccgccctgacccccgagttggtggcccgccaggttgccgggctgctcaccgaccccgcgcggctggccgcgatgaccgcggccgcagccagggtgggacatcgcgatgccgcgggccaggtggcccgggccgcgctggccgtcgccaccggggccggtgccaggacaacgacgtga

SEQ ID NO: 310 - DNA, 621 bp, Mycobacterium Tuberculosis
ttggcgatattcctcatcgatctgccgcccagcgatatggagcgccgcctcggtgatgccctgacggtgtatgtcgacgcgatgcgctaccccaggggcaccgagactttgcgcgccccaatgtggctggagcacatccggcggcgcggctggcaggcggtcgcggccgtcgaggtaacggcagccgaacaggccgaggccgccgacaccacggcgctgccgtcggccgccgaactgagcaacgcgccaatgctcggagtggcgtacggctatcccggggcgcccggccagtggtggcaacagcaggtggtactgggcttgcaacgcagcggctttccgcgcctagcgatcgcccgactgatgaccagctacttcgagttgactgaattgcacatccttccccgcgctcaaggccgtggcctcggggaggcgttggcccgccgactgctagccggtcgcgacgaggacaacgtcctgctctccacaccggagaccaacggtgaggacaatcgggcgtggcggttgtaccgccggttgggcttcaccgacatcatccgcggctaccacttcgccggtgacccccgagcattcgccatcctgggtcgcacgctaccgctctaa

SEQ ID NO: 311 - DNA, 1551 bp, Mycobacterium Tuberculosis
atgactactccgagccatgctccagcggttgatttggctacagcgaaagatgctgttgtccaacacctttcgcgacttttcgagttcactaccggtccgcagggcggaccggcgcggctgggcttcgccggcgcggtgctgatcaccgcaggcgggctgggagccggcagcgtccgccaacatgacccgctgctggagtcgattcacatgtcctggctgcgcttcggccacggactcgtgctgtcgtcgattctgttgtggacaggtgtgggtgtgatgctgcttgcgtggctgggtctaggccgacgggtcctcgccggcgaagccaccgagttcaccatgcgggcaaccaccgttatctggctggcgccgctactgctgtcggtgcccgtcttcagccgggacacttactcgtatctggcccaaggggcgcttctgcgcgacggtctggatccttacgctgttggcccggtcggtaatcccaatgcgctgctggacgacgtaagcccgatctggacgatcaccaccgcgccctacggtcctgcgttcattctggttgcgaagttcgtcacggtaatcgtcggcaacaatgtcgtcgccggaaccatgctgttgcgtttgtgcatgctgcccgggctggcgttgctggtctgggccactccacgcttggccagccatctcggcacccacggcccgaccgcgctgtggatctgcgtgctgaacccactggtcctcatccatctgatgggcggggtgcacaacgagatgctgatggtgggtctgatgaccgccggtatcgcgttgaccgtccagggccgtaatgtcgcggggatcatcctgatcaccgttgcgatcgcggtgaaggccaccgccggaatcgcgttgcccttcttggtctgggtttggctgcgtcatctgcgtgagcgacgggggtaccggccggtccaggcgttcctggcagccgccgcgatatcgctgctgatcttcgtcgcggtgttcgcggtgctgtctgcggtagccggcgttggcctagggtggctgaccgcgctggccggctcggtgaaaatcatcaactggctgacggtgcccaccggggcggccaacgtgatccacgcgctgggcagagggctcttcacggtcgacttctacaccttgctgcggatcacccggctgatcggaatcgtgatcatcgcggtgtcgctgccgctgttgtggtggcggttccggcgcgacgaccgggccgcgctgaccggggtcgcatggtcgatgctgatcgtggtgctgttcgtacccgccgccctgccgtggtactactcctggccgctggcggtcgctgccccgttggcccaggcacgacgggcgatcgcggccatcgccgggctctcgacttgggtgatggtgatcttcaaacccgacggatcgcacgggatgtattcgtggctgcacttctggatcgccaccgcctgcgcactgactgcgtggtatgtcctgtatcggtcaccggaccggcgcggagtgcaggctgcaaccccggtggtcaatacgccatag

SEQ ID NO: 312 - DNA, 1284 bp, Mycobacterium Tuberculosis
atgagtgcatggcgggcgcccgaggtgggcagtcgactcgggcggagggtgttgtggtgcctgctgtggctgctggccggcgtggcgttgggctacgtggcctggcggttgttcggccacacgccgtatcgcatcgatatcgacatctatcagatgggcgctcgagcttggctggacgggcgtccgctgtatggcggtggtgtgttgttccacacacccatcgggctgaacctcccgttcacctatcctccactggcggccgtcctgttcagcccattcgcctggttgcagatgccggctgccagcgtcgcgatcacggtgctaaccctggtgctgctgatcgcgtcgacggcgatcgtgctgaccggcctcgacgcatggccaacctcccgactggtacccgcgccggctcggttacgccggttgtggttggccgtgctcatcgtggctccggcaacgatttggctggagccgatcagctcgaacttcgctttcggtcagatcaatgtggtgctgatgaccctggtgatcgtcgactgcttcccacgccgaacgccatggccacgcgggctgatgttggggctggggatagccctcaaactcacccccgcggtgtttctcctctacttcctgctacgtcgggacggtcgggccgcgctgacggcgctggcgtcgttcgcggtcgccacgctgctcggtttcgtcctggcgtggcgcgactcctgggagtactggacgcatacccttcaccacacggaccggatcggcgctgccgccttgaacacagaccagaacatcgcgggcgcactcgcgcggttgacgattggcgatgacgaacgcttcgcactgtgggtggccggatccctgctcgtgttggcagcgaccatatgggcgatgcggcgagtgttgcgggccggcgagccgaccctggctgtgatctgcgtcgccctgttcgggttggtagtttcgccggtctcgtggtcacaccattgggtgtggatgctgccggccgtgctggtgattgggctactgggttggcgtcgccgcaacgtcgcgttggccatgctcagcctggccggggtggtgctgatgaggtggacaccgatcgacctgcttccccaacaccgggagacgactgcggtctggtggcgtcaactcgcggggatgtcctacgtgtggtgggcgctggcggtcatcgtcgttgccggactcaccgttaccgccaggatgacgccgcagcgctcgcttacgcgcggactgaccccggcgccgacggccagctga

SEQ ID NO: 313 - DNA, 435 bp, Mycobacterium Tuberculosis
gtggcggacaagacgacacagacgatttacatcgacgcggatccaggcgaggtgatgaaggcgatcgccgacatcgaagcctacccgcaatggatttcggagtataaggaagtcgagatcctagaggccgacgacgagggctacccgaaacgagcgcgaatgttgatggacgcagccatcttcaaagacaccttgatcatgtcctacgagtggccggaagaccgccaatcgcttagctggactctcgaatccagctcgctgctaaagtccctcgaaggcacgtatcgcttggcgcccaagggttctggcactgaggtcacctacgagcttgccgtcgaccttgctgtccccatgatcgggatgctcaagcgtaaggcggaacgcaggttgatagacggcgcgttgaaggatctgaagaaacgagtcgagggctga

SEQ ID NO: 314 - DNA, 645 bp, Mycobacterium Tuberculosis
atggtgagcagatattccgcataccggcgtgggccggatgtaatctcgccggacgtcatcgatcgcatcctggttggggcatgtgccgcggtgtggctggtgttcaccggcgtgtcggtggccgccgctgtcgccctgatggacctgggtaggggcttccacgagatggccggaaacccgcacaccacgtgggtgctgtacgccgtaattgtggtctccgcactggtcatcgtgggcgcgataccggtgctgttgcgagctcgccgcatggctgaggccgagcccgcgacgaggccgacgggtgcatccgtgcggggcgggcgatcgatcggatccgggcatccggcgaaacgcgctgtggccgagtcggcacccgtacagcacgcggatgcattcgaggtggccgccgagtggtccagtgaggcggtggaccggatctggttgcgcgggacagtcgtgttgaccagtgcgattggcattgcgttgattgccgtggcggcggcgacctacctcatggcggtcggtcacgacgggccatcttggatcagctacgggttggccggggtggtcaccgcgggcatgccggtgatcgagtggctatacgctcggcagctgcgccgggtggtggcgccccagtccagttag

SEQ ID NO: 315 - DNA, 711 bp, Mycobacterium Tuberculosis
gtgaagctgctgggccaccggaagagccatggacaccaaagggccgacgcatcacccgatgccgggtcgaaagatggttgccggcctgattccggacgcacgtccgggtcggacacatcgcgcgggtcgcaaaccaccggccccaagggccggcccacgcccaagcgcaaccaatcccgtcgccacaccaagaagggcccggtcgcaccggcaccaatgactgcggcccaggcacgggcccggcgcaagtcgcttgccggccccaaacttagccgcgaggaacggagagccgaaaaggccgcaaaccgggcccggatgacggaacgccgggaacgcatgatggccggcgaagaggcctacctgctcccgcgcgaccggggcccggtacgccgctacgtgcgcgatgtggtggactcccggcgcaacctgctcgggctgttcatgccctcggcgttgaccctgctgttcgtcatgtttgccgtgccgcaggtgcagttttacttgtctccggcgatgttgatactgctggccttgatgacgatcgacgcgatcatcttgggtcgcaaagttggccggctggttgacacgaagttcccgtctaacaccgaaagccggtggaggctgggtctttacgccgccggccgagcttcccagatacgccggttgcgggcgccccgaccccaagtcgagcgcggcggcgatgttggctaa

SEQ ID NO: 316 - DNA, 693 bp, Mycobacterium Tuberculosis
gtgacgggttctatccggtcgaagctgtccgcgatcgacgtccgccagctggggaccgtcgactaccggaccgcgtggcagctacagcgagagctagccgacgcccgggtcgccggcggcgccgacacgctgctgctgttggaacaccccgcggtctacaccgccggacggcgtaccgagacacacgagcgacccattgacggcactccggtcgtcgacaccgaccgcggcggcaagatcacctggcacggtccggggcaattggtcggctacccgatcatcgggctggccgaacccctcgacgtggtcaattacgttcggcgccttgaagaatcgctgatccaagtctgcgccgatctgggcctgcacgccggccgcgtcgacggccggtccggggtctggctgcccggcaggccggcgcgcaaggtcgcggccatcggtgtccgggtgtcgcgggcgacgacactgcacgggtttgcgctcaactgcgattgtgatttggctgccttcaccgccatcgtgccatgcggaatcagtgacgccgcagtgacatcgctgtccgccgaactcggccgtacggtcaccgtcgacgaggtccgcgcgacggtcgccgccgctgtctgcgccgctctggacggcgtcctaccggtcggtgaccgcgtgccctcacacgccgtaccatcgccgttatga

SEQ ID NO: 317 - DNA, 936 bp, Mycobacterium Tuberculosis
atgagtgtcgctgccgagggccggcgcctgttacgcctggaggtgcgcaacgcgcagaccccaatcgagcgcaaaccgccgtggatcaagacacgagcccgcatcgggccggagtacaccgagctgaagaacctggtccgccgcgaggggctgcacacggtctgcgaggaggccggctgccccaacatcttcgaatgctgggaggaccgagaagccaccttcctgatcggcggtgaccagtgcacccgccgatgcgatttctgccagatcgacaccggaaagcccgccgagctggaccgcgacgagccacgccgagtcgccgacagcgtgcgcacgatgggcctgcgctatgccaccgtcaccggcgtggctcgcgacgacctgcctgacggcggggcctggctgtacgccgcgaccgtgcgcgccatcaaggaactcaatccgtcgaccggcgtcgaactgctgattcccgacttcaacggcgaaccaacccggctggccgaggtcttcgagtccggcccggaagtcctggcacacaatgtcgaaaccgtgccccgtatcttcaagcggatccggccggcgttcacgtaccggcgcagcctgggtgtgcttaccgctgcgcgcgacgccggcctggtcaccaagagcaacctcatcctcggcctgggcgaaacctccgacgaggtgcgcaccgccctgggcgatctgcgcgacgccggctgcgacatcgttaccatcacccaatacctgcggccgtcggcgcgccaccatccggtcgagcgctgggtgaagcccgaggagttcgtccagttcgcgcgattcgccgaagggctgggcttcgccggggtattggcgggacccctggttaggtcgtcatatcgggcgggccggctctacgaacaggcacgtaactcacgggccttggcatcccgctag

SEQ ID NO: 318 - DNA, 2985 bp, Mycobacterium Tuberculosis
gtggtcgtgaccaaactcgccacgcagcggccgaagttgcccagcgttggccggctcggattagttgacccccctgctggtgagcgtctggctcagctggggtgggatcggcacgaggatcaggcgcacgtcgacctgctgtggtcgctgtcacgcgctccggacgccgatgccgcgctgcgcgccttgatccggctgtcggagaatccagacaccggatgggacgagctcaacgcggctctgctgcgcgaacgcagtctgcgcgggcggctgttctcggtgctgggctcgtcgctggcgttgggcgatcacctggtcgcccatccgcagtcctggaaattgctgcggggcaaggtcacactgccgtcccatgaccagctgcagcggtcgttcgtcgagtgcgtcgaggaatcggagggtatgccgggctcgctcgtgcaccgattgcgaacccagtaccgcgactacgtgctaatgctggccgctctcgacctggccgcgacggtcgaggacgaaccggtgctgccattcaccgtggtggccgcacgcctggcggacgccgcggacgccgctctggcggcggcgctgcgcgtggccgaggcgagcgtgtgcggcgagcacccgccaccgcgcctggcggtcatcgcgatgggcaagtgcggtgcgcgcgaactgaactacgtcagcgacgtcgatgtcatattcgttgccgagcgctccgacccgcgcaacgcgcgcgtggccagcgagatgatgcgggtggcctcggcggcctttttcgaggtggacgccgccctgcgtccggaggggcgcaacggggagctggtccgtacgctcgagtcgcacatcgcctactaccagcgctgggccaagacctgggagtttcaggcgttgctgaaagcacggccagtcgttggcgacgcggaacttggcgagcgttacctgaccgccttgatgccgatggtgtggcgagcctgcgagcgcgaagactttgtggtcgaggtgcaggccatgcggcggcgggtggagcagctggtgcccgccgatgtccgcggccgcgagctcaaactcggcagcggcggattgcgcgacgtggagttcgccgtacagctactgcagctggttcatgcccgtagcgacgagtcgttacgggtggcgtccacggtggacgcattggcggcgttgggcgaaggcggctacatcgggcgtgaggacgcggcgaacatgaccgcgtcgtatgagttcctcaggctgctcgagcaccgactgcagttgcagcggctcaagcgcacccacctgcttcccgatcccgaagacgaggaggcagtgcgctggctggcgcgcgcggcccacatccggcccgatggccgaaacgatgcggccggggtgctgcgggaggaactcaagaagcagaacgtgcgggtgtcgaagttacacaccaaactcttctatcaaccgctgctggaatcgatcggcccgaccgggttggagatcgcccacggcatgacgttggaggccgcggggcgccggctggccgcgctgggctacgagggaccgcagaccgcgttgaaacacatgtcggcgttggtcaatcaaagcggccggcgcggacgggtgcagtcggtgctgctgcccaggctgctggactggatgtcgtatgcccccgatcccgacggcggactgctggcctaccggcggctcagtgaggcgctggccaccgaaagctggtacctggccacgctgcgggacaagcccgcggtggccaagcggctcatgcatgtcttgggtacctcggcgtatgtgccggatctgttgatgcgcgcgccgcgggtcatccagcagtacgaggacgggcctgcgggcccgaagctgctcgagaccgagcccgccgccgtggctcgggcgctgatcgcctcggcgagccgctaccccgacccggagcgggccatcgccggcgcgcgcacgctgcgtcgtcgagagctggcccgcatcggttcggcggacctgctcggcctgctcgaggtcaccgaggtgtgccgggcgttgacgtcggtgtgggtggcggtgctgcaggccgcgctggacgtcatgatccgggccagccttcccgacgacgatcgcgccccggcggccatcgcggtcatcggcatgggtcggctgggtggtgccgagttgggctacgggtcggatgccgacgtgatgttcgtctgtgagccggccaccggcgtcgacgatgcacgggcggtgaaatggtcgacatcgatcgccgagcgggttcgggcgctgctggggacacccagcgtcgatccgccgctggagctcgacgccaatttgcgacccgagggccgcaacggtccgctggtccgcaccctggggtcctacgccgcatactacgagcagtgggcacagccatgggagatccaggccctgctacgcgcacacgcggttgccggcgatgccgagttgggtcagcgattcctacggatggtcgacaaaacgcggtatccgcccgacggtgtgtccgctgactcggtgcgcgagattcgccgcatcaaggcccgtatcgagtccgagcggttgccgcgcggtgccgaccccaacacacacaccaaactgggccgcggcggactggccgacatcgaatggaccgtgcagttgctgcagctacagcatgcgcaccaggttcccgccctgcacaacacctcgacgctgcaatccctggatgtcatcgcggccgccgatctggttcccgcagccgacgtggagctgctccgtcaggcctggctgaccgccacccgggcccgcaacgcgctggtgttggtgcgcggcaagcccaccgaccagctgccgggacccgggcgccagctcaatgcggtcgcggtcgcggccggctggcgaaacgacgacggtggggaattcctggacaactacctacgggtgacgcggcgggcaaaggcggtagtgcgcaaagtgttcgggagttga

SEQ ID NO: 319 - DNA, 1341 bp, Mycobacterium Tuberculosis
atggaccgacagaaggaattcgttcttcgtaccctggaagaacgcgacatccgcttcgtccggctgtggttcacagacgtgctcggtttcctcaagtcggtcgccatcgccccagccgaactcgagggcgccttcgaggaaggcatcggcttcgacggatcctcgatcgagggctttgcgcgggtctcggaatccgatacggtggcgcacccggacccgtcgaccttccaggtgctgccctgggccaccagttccggccaccaccactcagcgcggatgttttgcgacatcaccatgccggacggctcgccgtcgtgggcggacccgcggcacgtgttgcggcggcagctgacgaaggccggcgaactcggcttctcctgctacgtgcatcccgaaatcgagttcttcctgctcaagcccggacccgaggacgggtcggtgcccgtcccggtcgacaacgccggctatttcgaccaagcggtgcacgactccgccttgaactttcgccgccacgcgatcgatgccctggaattcatgggcatctcggtggagttcagccatcacgaaggcgcacccggccagcaggagatcgacctgcggtttgccgacgctctgtcgatggctgacaacgtgatgaccttccgctacgtcatcaaagaagtcgcgctggaagagggcgcccgggcgtcgttcatgcccaagccattcggccagcacccgggctcggcgatgcacacccacatgagcctgttcgagggtgatgtcaacgcgttccacagcgctgatgatccgctgcagctgtcggaagtgggtaaatcgttcatcgccgggatcctggagcacgcttgcgagatcagcgcggtcacaaatcagtgggtcaactcttacaagcggctggtgcagggcggcgaagcgcccacggccgcgtcgtggggggccgccaaccgatccgccctagtgcgggtgccgatgtacacgccgcacaagacctcgtcgcggcgggtcgaagtacgcagccctgattcggcgtgcaatccctatctgacattcgccgtgctgctggccgcgggattgcggggtgtagagaagggttacgtgctgggcccgcaggccgaggacaacgtatgggacctcacacccgaggaacgccgagcgatggggtaccgagaattgccgtccagtttggatagtgcgctgcgcgccatggaggcctccgaactcgtcgcggaggccttgggggagcacgtttttgactttttcttgcgcaacaagcgcacggagtgggcgaactaccgcagccacgtcacgccatacgagctgcgcacctacctgtcgctgtag

SEQ ID NO: 320 - DNA, 1563 bp, Mycobacterium Tuberculosis
gtgggcatgaggctgtctcgccgcgacaagatcgcgcgcatgctgttgatctgggccgcgctcgccgccgtggcgttggttcttgtgggctgcatccgcgtggtcgggggacgcgctcgtatggcggagccgaagctgggccagccggtggagtggacaccgtgccggtcgtcaaacccgcaagtaaagatccccggcggcgcgttatgcggcaagctcgctgtaccggtcgactacgaccgccccgatggtgacgtggcggcgctggcgctgattcgctttccggcgacgggagacaagatcggttcgctggtcataaatcccggtggacccggcgaatccggtatcgaggccgccttgggcgtcttccagacattgccgaagcgggtgcacgaaaggttcgacctggttgggttcgacccccgcggggtggcgtcgtcccggccggcgatctggtgcaactccgatgccgacaacgaccggctgcgggccgagccgcaggttgactacagccgggagggtgtggcgcacatcgagaacgagaccaagcaattcgtcggtcgctgtgtggacaagatgggcaagaactttctggcccatgtcgggacggtcaacgtcgccaaggacctggatgccattcgcgcggcgttgggcgacgacaagctgacctacctgggctactcgtacggcacccggatcggctccgcgtatgccgaggaatttccgcagcgggtgcgggcaatgattctcgacggtgccgtcgaccccaatgccgatcccatcgaggcggagctgcgccaggccaagggcttccaggacgcgttcaacaactatgccgccgactgcgccaagaacgcgggctgcccgctgggcgccgacccggccaaagccgtcgaggtctaccacagcctggtcgatccgttggtcgacccggacaacccgaggatcagcaggccggcgcgcacgaaggatccgcgcgggctgagttatagcgacgccatcgtgggcaccattatggcgctgtactcaccgaatctgtggcaacacttgaccgacgggctgtcggagctggtcgacaatcgcggagacaccctgctggctctggccgacatgtacatgcgtcgggactcgcacggccgctacaacaattccggtgacgcgcgggtggcgatcaattgcgtcgatcagcccccggttaccgatcgcgacaaggtcatcgacgaagaccgccgcgcccgggagatcgcaccgttcatgagctacgggaagttcaccggtgatgcgccgctgggcacctgcgcgttctggccggtgccacccacaagtcagccccatgccgtctcggcgcccggcctagtgccgacggtggtggtatccaccacccatgacccggcgacgccgtacaaggccggggtcgacctggcgaaccagcttcgcggttcgttgctgaccttcgacggaacccagcacacggtggtattccagggcgacagctgcattgacgagtacgtgacggcgtatttaatcggcggcaccacgccgcccagcggcgccaagtgctag

SEQ ID NO: 321 - DNA, 909 bp, Mycobacterium Tuberculosis
gtgattgcgttgctcgcacccggacagggttcgcaaaccgagggaatgttgtcgccgtggcttcagctgcccggcgcagcggaccagatcgcggcgtggtcgaaagccgctgatctagatcttgcccggctgggcaccaccgcctcgaccgaggagatcaccgacaccgcggtcgcccagccattgatcgtcgccgcgactctgctggcccaccaggaactggcgcgccgatgcgtgctcgccggcaaggacgtcatcgtggccggccactccgtcggcgaaatcgcggcctacgcaatcgccggtgtgatagccgccgacgacgccgtcgcgctggccgccacccgcggcgccgagatggccaaggcctgcgccaccgagccgaccggcatgtctgcggtgctcggcggcgacgagaccgaggtgctgagtcgcctcgagcagctcgacttggtcccggcaaaccgcaacgccgccggccagatcgtcgctgccggccggctgaccgcgttggagaagctcgccgaagacccgccggccaaggcgcgggtgcgtgcactgggtgtcgccggagcgttccacaccgagttcatggcgcccgcacttgacggctttgcggcggccgcggccaacatcgcaaccgccgaccccaccgccacgctgctgtccaaccgcgacgggaagccggtgacatccgcggccgcggcgatggacaccctggtctcccagctcacccaaccggtgcgatgggacctgtgcaccgcgacgctgcgcgaacacacagtcacggcgatcgtggagttcccccccgcgggcacgcttagcggtatcgccaaacgcgaacttcggggggttccggcacgcgccgtcaagtcacccgcagacctggacgagctggcaaacctataa

SEQ ID NO: 322 - DNA, 348 bp, Mycobacterium Tuberculosis
gtgcctgtcactcaggaagaaatcattgccggtatcgccgagatcatcgaagaggtaaccggtatcgagccgtccgagatcaccccggagaagtcgttcgtcgacgacctggacatcgactcgctgtcgatggtcgagatcgccgtgcagaccgaggacaagtacggcgtcaagatccccgacgaggacctcgccggtctgcgtaccgtcggtgacgttgtcgcctacatccagaagctcgaggaagaaaacccggaggcggctcaggcgttgcgcgcgaagattgagtcggagaaccccgatgccgttgccaacgttcaggcgaggcttgaggccgagtccaagtga

SEQ ID NO: 323 - DNA, 930 bp, Mycobacterium Tuberculosis
atgagcgccgggcagctgcgccggcatgagatcggcaaggtcaccgcgctgaccaatcccctgtcaggccatggcgccgccgtaaaggctgcacacggcgcgatcgcccggctgaagcatcggggggtggacgtcgtcgagatcgtcggcggggacgcccacgacgcacgccatctgctcgccgcggcagtcgcaaaaggcactgacgcggtgatggtgaccggcggtgacggagtcgtctccaacgcgctacaggtcttggcgggcaccgacattccgttaggaatcattccggccggcactggtaacgaccacgcacgcgaattcgggcttcccacaaagaatcccaaggcagccgcagatatcgttgttgacggctggacggaaaccattgacctgggccggattcaagacgacaacggtatcgaaaagtggttcggtaccgtggcggctaccggattcgactccctggtcaacgatcgcgccaaccgaatgcgctggccacacgggcggatgcgctattacatcgcgatgctcgccgaactgtcgcggctgcggccgttgccgttccggctggtgctcgacggcaccgaagagatcgtcgccgacctcacacttgccgacttcggcaatacccgcagctacggcggcggattattgatctgccccaacgccgaccactcggacggcctgctcgacatcaccatggcccagtcggattcccgtaccaagttgctccgcctgttccccaccattttcaaaggcgcccatgtcgagcttgacgaggtgagcaccacacgagccaagacagtccacgtcgagtgccccggtatcaacgtctatgccgacggcgacttcgcctgcccgttaccagccgagatctccgcggtgccggccgcccttcaggttcttcgcccccgccacggataa

SEQ ID NO: 324 - DNA, 504 bp, Mycobacterium Tuberculosis
atgtccggacaccgcaagaaggcaatgctcgccttggcggctgcgtcgctggcagcgacgctggccccgaacgcagtcgcggccgcagaaccgtcgtggaacgggcagtacctcgtgacgttgtctgccaacgcgaaaaccggcaccagcatggcggccaaccggccagagtatccacacaaagcgaactacacgttcagctcgcgctgcgcgtccgatgtctgcattgccaccgtggtcgacgctccgccaccaaaaaacgagttcatcccgcggccaatcgaatacacctggaatgggactcaatgggtacgggagatcagctggcaatgggactgcctgctacccgacggcacaatcgaatatgccccagccaaatcgatcacggcctacacgcccggtcagtacggaatcctcaccggcgtctttcataccgatatcgccagcggcacgtgtaaaggcaatgtcgacatgccagtgtcggccaaaccgatcgttggctga

SEQ ID NO: 325 - DNA, 1062 bp, Mycobacterium Tuberculosis
atgagcggagcactcgagaccaccgaagaattcggcaaccgttttgttgcggccatcgacagcgccggtttggcgatcctggtgagcgttggacaccagaccgggctgctggacaccatggccggacttccgccagccaccagcatggagatcgctgaggctgcggggttggaagagcgctacgttcgggagtggctaggcggcatgaccaccgggcagatcgtcgaatacgacgcggggagctcgacctactcgctgcctgcccaccgcgccggcatgctgacccgtgcggccgggccggacaacctcgccgtgatagcacagttcgtttcgctgctcggcgaggtcgaacaaaaggtcattcgctgcttccgggaaggcggcggtgtgccctacagcgaatacccgcgcttccacaagctgatggccgagatgagcggcatggtgttcgatgccgccttgatcgacgtggtgctcccgctggtcgacggccttccggaccgcttgcggtccggagccgacgtggccgatttcggttgcggcagtggtcgcgcggtcaagctgatggcgcaggcgttcggcgcgagccgattcaccggcatcgacttttccgacgaggccgttgcggcggggaccgaggaggcggctcggttgggcctggcaaacgcgaccttcgagcgccatgacctggcagagctggacaaggtgggggcctacgacgtgatcaccgtgttcgacgcgattcacgaccaggcgcagccggcgcgcgtcctgcagaacatctatcgtgcgctgcgacccggtggtgtgctgctgatggtcgacatcaaggcatcgagtcaactggaagacaatgtcggcgttccgctgagcacctacctgtacacgacctcgctaatgcactgcatgacggtgtcgctggcgcttgacggggccgggttggggacggtgtggggcaggcagttggccacctcgatgctcgccgacgccggttttaccgacgtgacggtggccgagatcgagtcggacgtgttgaacaactactacatcgcccggaagtga

SEQ ID NO: 326 - DNA, 327 bp, Mycobacterium Tuberculosis
atgtcaggtggttcatcgaggaggtacccgccggagctgcgtgagcgggcggtgcggatggtcgcagagatccgcggtcagcacgattcggagtgggcagcgatcagtgaggtcgcccgtctacttggtgttggctgcgcggagacggtgcgtaagtgggtgcgccaggcgcaggtcgatgccggcgcacggcccgggaccacgaccgaagaatccgctgagctgaagcgcttgcggcgggacaacgccgaattgcgaagggcgaacgcgattttaaagaccgcgtcggctttcttcgcggccgagctcgaccggccagcacgctaa

SEQ ID NO: 327 - DNA, 195 bp, Mycobacterium Tuberculosis
atgctcgaaaaatgcccccacgcgagcgtcgactgcggtgcctcgaaaatcggcatcaccgacaacgaccccgcgaccgccaccaaccgcaggctggcgagcacaattcgcaagccgccgatcgagcacgcggccgggcccttagggtccacatcacgcgctggccaccgttcgtacggcggggtggcctcgtaa

SEQ ID NO: 328 - DNA, 378 bp, Mycobacterium Tuberculosis
gtgagccggcgccgcccgctgatcgaaccagcaacggttcaggttttggccattgctttcacagactcattcagcgtttcattgcactggccgcagcgcgagcagggctgccgcacagcgatcttggcgcctatgcgaaggtggtgcgatggtgatgtggacgggcgaaagttactgccaccggcacgccgcactggcacccaacagaggaggatcaggcccgccgcacccagggtctacacgaccggcgacatcctgcgtgatcggaagggcatagcgccatggcaggaacaacgcgaaccgggctgggcgccgttcggttggctgcacgagccctcgggcgcaaggtgcccaaaagccgacgggcagtcagtctaa

SEQ ID NO: 329 - DNA, 1224 bp, Mycobacterium Tuberculosis
gtgatacctaacccactcgaggagctaacgctcgagcaactgcgaagccaacgcacgagcatgaagtggcgtgcgcacccagccgacgtcttgccgttgtgggtcgcggagatggacgtgaagcttccgccgacggtggccgatgccctccgtagagctatcgacgacggcgacaccggatatccctatggaacggagtatgccgaagccgtccgcgaattcgcttgccaacgttggcaatggcacgacctggaagtgagccgcacggccatcgttcccgacgtcatgctcggcatcgtcgaagtgctgcgtctgatcaccgaccgcggtgaccctgtgatcgtcaactccccggtatatgcgccgttctacgctttcgtgtcgcatgacggccgccgagtgatcccagcgccgctgcggggagacggccggatcgatttggacgcgctgcaggaagcgttctcgagcgcgcgtgcttcaagcggctcgagcggcaacgtcgcctacctcctgtgcaatccgcacaacccgacggggtcggtgcacaccgccgacgaactgcgcggcatcgcggaacgcgcccaacggttcggtgtccgggtggtgtccgacgagattcatgcccctcttatcccgtccggggcacggtttacgccctatctgagcgtccccggtgcggaaaacgcattcgcactaatgtcggcttccaaggcgtggaatctcggcggactcaaggcagccctggccattgccggtcgcgaggcggcggccgacctcgctcggatgcccgaggaggtcggtcacggccccagccacctgggtgtcatcgcgcacaccgcggcgttcaggactggtggcaactggctcgacgcgctgctgcgcggtctggaccacaatcgaacgttgctaggcgctctggtcgacgagcatcttcccggggtgcaataccgatggccgcagggtacttacctggcgtggctggattgccgagaactcggcttcgatgacgcggctagcgacgagatgaccgaaggcctggcggtggtgtcagatctgtccgggccagcccgctggttcctcgaccacgcgcgggttgcgctcagttctggtcacgtcttcgggattggcggtgccgggcatgtgcgcatcaacttcgcgacctcccgagccattctcatcgaggcggtatcgcggatgagccggtcactactcgagcgccggtag

SEQ ID NO: 330 - DNA, 639 bp, Mycobacterium Tuberculosis
atggaccagtcggccaaccatgcgtgtctgcccaccccgctggcgagcacaacagggcgcgggcaagatcatgagatgcctgtcgaagagacctccaccccccagaagctgccccaatttcgttatcaccccgatcccgtcggcaccggctcgatagtcgccgacgaggtgagctgcgtgagctgcgagcaacgtcggccctacacctacaccggcccggtgtatgcggaggaggagcttaacgaggccatctgtccttggtgtatcgcagatggcagtgcggcgagtcgcttcgatgccacgttcaccgacgccatgtgggcggtgcccgacgacgttccagaggacgtgaccgaggaagtgctgtgccgaacacccgggttcacgggctggctgcaggaggaatggttgcatcactgcggggacgccgccgccttccttggcccggtgggcgccagcgaggtggccgacctccctgacgccctggatgcgctgcgcaatgagtaccgcggctacgactggcccgccgacaaaatcgaggaattcatcctgacgctcgatcgaaacgggctggcgaccgcctacctcttcaggtgcctgagctgcggcgtccacttggcctacgccgatttcgcttaa

SEQ ID NO: 331 - DNA, 933 bp, Mycobacterium Tuberculosis
atggtagcgacccgcggccgcccgtgcccgaccaatttttccaggccgcagcggccccgagtggccggcaatggcacaaagtcccagcggtgtcgcggtaggttgacgaccagtatgttaggtgtcgcccccgaagcgaagggaccgccggtgaaggtccaccacctcaactgcggcaccatgaatgcatttggcatcgctctgttatgccacgttctgctcgtcgagaccgacgatggattggtgctggtggacaccggcttcggtatccaggactgccttgaccccggccgggtaggtctattccgtcatgtcctgcggccggcattcttgcaggccgaaaccgcggcccgccagatcgaacagctcggctaccgcacgtccgacgttcgacacattgtgctcacccacttcgacttcgaccacatcggcgggatcgccgacttccccgaggctcacctccacgtcaccgccgccgaagcccgcggtgccatccacgccccttcgctccgcgagcgactgcgatatcgacgcggacagtgggcccacggcccgaagctggtggagcacggtcccgacggggaaccctggcgcggattcgcatcggccaaacccctcgattccatcggcaccggtgtcgttctggtgccgatgcccggtcacacccgcgggcacgccgcggtagctgtcgatgccggtcaccgctgggttttgcactgcggcgacgccttctatcatcgcggcaccctcgatggccggttccgggtgcccttcgtgatgcgggccgaggaaaagctgttgtcgtataaccgcaaccaactgcgcgacaaccaggcccgaatcgtcgaactccatcgacgccacgacccggatctactcatcgtctgcgcacacgatcccgacctctatcagcttgctcgcgatacggcctag

SEQ ID NO: 332 - DNA, 1149 bp, Mycobacterium Tuberculosis
atgcagttcctgagcgtgattccagagcaggtcgagtccgcggctcaagatttggcgggcattcgctcagcgctgagcgcgtcttacgcggccgcagcgggacccacaacagcggtggtttccgctgccgaggacgaggtgtcgaccgcgattgcgtcgatattcggcgcctacggtcgacagtgccaggttctcagcgcccaggcctccgcgtttcatgacgagttcgtcaacctgttgaaaactggcgcgactgcataccgcaacaccgaattcgccaacgcccaaagcaacgtgctgaatgcagtgaacgcaccggcccgatcgctgttggggcacccgagcgcggctgagagcgtgcagaactcggccccaacgctaggcggtggccacagcaccgtgaccgctgggcttgccgcacaggccggtcgtgccgtcgcgacggtcgaacaacaggctgcggctgcggttgccccgttgccaagcgccggcgccggactggctcaggttgtcaacggcgtcgtgaccgccggacagggttccgccgccaaacttgccaccgcgctgcagagcgccgcgccctggctggccaagagcggcggcgagttcatcgtggctgggcagagcgcgctgaccggtgttgctttgctgcaacctgccgtggtcggcgttgttcaggcgggcggtacgttcttgaccgccggaacgagcgctgctaccggactgggtctgctcacacttgctggtgttgagttcagtcaaggcgttggcaaccttgcgctggcttcagggaccgccgcgaccggacttggtctgctgggcagtgccggtgtgcaactgttcagtcctgcctttttactggctgtgcccaccgcgttgggtggagttggctcgctcgcgatcgcagtagttcagcttgtgcaaggcgtccaacacctgtcgttggttgtgccgaacgttgttgccgggatcgctgcactgcagaccgccggtgcccagtttgcccagggtgttaaccacacgatgctggccgctcagctcggtgcccctgggatagctgtcttacagaccgccggtggccattttgctcaaggcattggccacctgacgacggctggcaatgccgctgtcacggtgctgatctcctag

SEQ ID NO: 333 - DNA, 1548 bp, Mycobacterium Tuberculosis
atggaacagcacacgctgctgcaacgcgaggagtcgccgcgcagtcccgcggccccttcgctcaggcgcctgggtggctcacgtcacatcacgcattgggatcccgaggatctaggagcgtgggaggcaggcaacaagggcattgcccgacgcaatctgctttggtcggtcgtgacggttcacctgggttactcggtgtggacgctctggccggtgctggagttgctgatgccccaggacgtctacggcttttcaaccagtgacaagtttctgctcggcaccatcgcgacgctgtttggcgcgttcctgcggatgccctacgcgttggccagcgcgatctttggcggtcgcaactgggcgactttttcggcaatcgtgttgctaattccggccattggcacaacggtgttgttgacccatccggggctaccgctgtggccgtatctggtgtgtgcggccctgaccggcttaggcggcggcaacttcgcgtcgtcaatgagcaacgccaatgctttctatccacatcggctcaagggttcggcgctcggaattgccggtggggtaggcaatctcggggtgccggcgatccagctagttgggttgttggcaatcgccactgtcggtgagcggaagccttacctggtctgcgcactgtatgtggttctggtggcaatcgcggtaatcggagtgtcgctgttcatgaacaatgtcgaacagcaccgggtgcaggtgaaccggcttcggccgatcgtttccgcggttctgtcgacccgcgacacgtggttgctctcgctgctctacctcggcactttcggctcattcatcggcttctccttcgtgtttggccaggtgttgcagaccaacttcctggcgtgcggacaaagcccggcgcgcgcgacgctgcatgccgtcgagttggcgtttgtcgggccgttgctggcggcggtggcccggatttacggtggccggctggccgatcgagtcggtggaagccgcttgacccttatagtctttgtggcgatgacgctcgccgctgggctgctgatcagtgccagcaccctcgaaggccgacatgtcggccagcatcggggcgctaccatggtcggctacttcgtctgcttcgtcgcgttgttcgtcctatccgggttgggcaacgggtctgtgtacaagatgattccgacgatttttgaggcgtgcagccgctccctggatctcagtgaagccgaacgccgcgactggtcacgcatcatctcaggagtagtcatcgggtttgtggccgccttcggcgcgctcggcggggtcggaatcaatatggcgctgcgtgagtcctacctcagcaccggcagtgggaccgatgcgttctggatcttcatgatgtgctacgccgctgccgccgttctgacttggaaagtgtacgaccgccgaacggtcaccgacatggggatgttgcaggcggccttggtgcggcagccggcatcgacgccagccgaacttatcggtcccagaactcaatcggaccgattctccgggtgcagcatctcggcgtaa

SEQ ID NO: 334 - DNA, 1614 bp, Mycobacterium Tuberculosis
atgaaccgcacgcagctcctcacgctcatcgccactggcctgggcctgttcatgatctttctcgacgcactgatcgtgaacgtggcgctgcccgacatccagcgcagtttcgcggtgggggaggacggcctgcagtgggtggtggcgtcctacagcctcggaatggcggtcttcatcatgtcggcggcgacgcttgccgacctcgacggtcggcgccgctggtacttgataggtgtttcgttgttcacgctgggatctatcgcctgcgggttggcgccctcaatcgcggtgctcaccaccgcgcggggcgcgcagggcctaggtgcggcggccgtcagcgtaacctcgctcgccctggtcagcgcggcctttccggaggcgaaggagaaggcgcgcgccatcgggatctggaccgccatcgcgagcatcggtacgacgacgggcccgacactgggcggtctgctggtggaccagtgggggtggcgcagcatcttctatgtcaacctgcccatgggcgcactcgtcctcttcctgactttgtgctacgtcgaggagtcgtgtaacgagcgggcacgccgcttcgatctgtccgggcagctgctgttcatcgttgccgtgggtgccctggtgtatgcggtcatcgaaggcccccagatcggctggacgtctgtccagaccatcgtgatgctctggacagccgccgtcggctgcgccctgttcgtctggcttgagcgcagatcatcgaatccgatgatggatctgaccctgttccgcgacacctcatacgccctggccatcgcgaccatctgcacggtgttcttcgccgtctatgggatgctgctgctcaccacccagttcctgcagaacgtgcgcggctataccccgagcgtgaccggcctgatgatccttccgttcagtgcggccgtggccatcgtgtcgccacttgttgggcacctggttggccggatcggagcacgcgttcccatcctggcggggctgtgcatgttgatgctgggtctgctcatgctcatcttcagcgagcaccggagctcggccctggtcctggtcgggctgggcttgtgcgggagcggcgtcgcgttgtgcctgacgccgatcacgaccgtcgccatgaccgcggtccccgccgagcgtgcgggcatggcgtccggcatcatgagtgctcagcgggcgatcggctcgacgatcgggttcgcggttttgggctccgtccttgccgcctggctttcggccacactcgagccccatctggagcgcgcggtgcccgacccggtccagcgccacgtccttgccgagatcattatcgacagtgccaatccgcgagcgcatgtgggcggaatcgtcccccggcggcacattgagcatcgcgaccccgtcgcgattgcggaggaggatttcatcgaaggcattcgggtggcgttgctcgtcgccactgcaacactggctgtcgtgtttctcgccggctggcgatggtttccgcgtgacgtgcacaccgcgggcagcgacctaagcgagaggctgcctacagcgatgaccgtcgagtgcgcggttagtcatatgccgggagccacatggtgtcgactatggcctgcctga

SEQ ID NO: 335 - DNA, 1242 bp, Mycobacterium Tuberculosis
atgtcgcacgttaccgcggccccgaacgttctggcggcgtcggccggggagctagccgcgatcggctccactatgcgcgcggccaacgccgctgcggccgccccgacggcaggagtgctggctgccggcggcgatgacgtgtcggctggcatcgcggcgttgtttggcgcgcgggcgcaggcctatcaggccattagcgctcaagcggcgctgtttcacgaccggtttgtacagatcctgcaagagggcgcggcggcgtatgccatggctgaggccgccaacgccttgccgctgcagaaagcgcagggcgtggtcagcgaactcgcccaagatcgcactggggggacgggcaccgggcaatctcgcggtgccggcgggtttggcggtgtcggccaggctggcggaaagggctgggacggcggaccgatcggcaacggtcaggtcggcgagcagcatggggccggccagctcggcagcaccgacggtaaccccggagtggctggcgccgcgcacggcagcggcgtttctgcttcgcacggcagcggcgcaacaggtgccgccggtgtcgcggacccgggtggcagtggtgctggggtcggtagcgcagccggcaatgggactggggccggcagcgcagacgcagtcggtggtgccgggactggcagggacatcgtcgggtctgttcgcggggacggcggagtcggcatggccagcggtgacggcggtctgagcaccggcgctgcgggcgcttctgctgagggcgggttgatgcccggcttcggtggggctccgtgggttggcgggcactgggggctcggcggtgaaggccattccggtgctatcggcggagtgggtgaacaggtggcacctgcggtagccacggcacctgcggtgtcgccggctaccacgtctgcggtggcagccgaatccggctcgacgccggcgaccaaggcgcaggcgatgcacgcgacgaccaaccccggcaacgcggcacaccagggcaacccggccgacccgggcaactcggcgcgccgggctgatggcgggcgcgatgagcagctactgcttcttccgttgacgagtcttcgggggttgcgccacacgctaaagaagttgtccgggcttcgagctcgaaatgggctgctgacagcatccggcgacaatgctagtggcagcggccggccgtgggaccgcgaccaactgctgcgcgctcttggtcttcgaccgcccgggcacgaatga

SEQ ID NO: 336 - DNA, 420 bp, Mycobacterium Tuberculosis
atgccagtaggtggtcggcagcacgttttcgagaagctggccagcatcctgggcttggtcgccgcgccgctcatgctccttggattgagtgcctgcggccgcagcgccggcaagaccagcgaaccgacctgccccacggagccgatcgatgcggccgacagctcgacaacaccggacccctcgtgtgtggtgcgggccactgagatcaacggcaacgggtcgcgcatccagacctggaccggcagctatgatgcggccgcaacccagtccggtggtgtgtgtggtggcacctgcaacttccacgccacagtgcggttcacggtcgacgaaggccagatctcgggcagcgtcgatcaggtctatcaagcggcgatggttgctatcgcaacacgccccacttcgccatctctggcaccatga

SEQ ID NO: 337 - DNA, 258 bp, Mycobacterium Tuberculosis
ttgatcgggtatgtcgccgtgttgggactgggttacgtgctgggcgcaaaagccgggcgccgccgctacgagcagatcgcgagcacctatcgcgcactcaccggcagccccgtggccaggtcgatgatcgaaggcgggcgtcgcaagatcgccaatcggatctcacccgatgctgggtttgtgaccctggccgagatcgacaaccagaccgccgttgtccagcgcggggtcgagcggcagccgaaaaccgcgcgctga

SEQ ID NO: 338 - DNA, 4386 bp, Mycobacterium Tuberculosis
atgggaccagtggccgtgacgcgagccgacgcgcggggcgccatcgacgatgtgatggcgctcagcccattgcaacagggactgttttctagggcgacactggtcgccgcggagtccggctctgaggccgcagaggccgacccgtatgtgatcgcgatggcggccgacgcggccggcccgctcgacatcgccttgcttcgcgactgcgctgccgcgatgctgacccggcaccccaacctgcgggcgagcttcctacacgggaacctgagccggcccgtgcaggtaataccatccagtgccgaggtgctttggcgtcacgtgcgcgcccaccccagtgaggtcggggcgctggcagccgaagagcgccggcgccgcttcgacgtcggccgcggaccactcatccggttcctgctcatcgaactaccggacgaatgttggcatctggtcatcgtcgcgcaccacatcgtcatcgacggatggtcgttgccgctgttcgtctccgagctgctcgccttgtatcgggctggtggtcacgtcgccgcgttgccggcagcgccgcggccgtatcgcgactacatcggctggctggccggccgcgatcagacggctagccgcgcaatgtgggcggaccacctcaatggcctggacggcccgactctgttatcgccggcactcgccgacactcctgtgcagccgggtattccgggacgcaccgaagtgcgccttgaccgtgaagccaccgcggagctggccgatgccgcccgcacccgtggcgtcacgatcagcacacttgttcaaatggcttgggctaccacgctttcagcattcaccggtcgtggcgatgtgacgttcggtgtgacggtgtccggcaggcccagcgaactgtccggcgtggaaacgatgatcggcctgttcatcaatacggtgccactgcgggtccgcctggacgcccgcgctaccgtcggcgggcaatgcgctgtcctacaacgtcaattcgccatgttgcgcgaccacagctatctcggtttcaacgagtttcgtgccatcgccggtatcggtgagatgttcgacaccctactggtgtatgagaacttcccgcccggcgaggtggtgggcaccgcggagttcgtcgcaaacggggtgacgttccgtccggtggcgctagagagtttgtcgcactttccggtgaccgtcgccgcgcaccgcagcaccggtgagctcacgctgctagtggaggtgctcgacggtgcgctgggcacgatggcgcccgaaagcctcggcaggcgggtgctggctgtgttacagcgcttggtcagccggtgggatcggccgctgcgcgacgtcgacattctgctggacggcgagcacgatccgaccgcacccggcctgccggatgtgacgacgtcggcacccgcggtgcatacccggttcgccgaaatcgctgcggcacagcctgactcggtggcggtcagttgggcggatggtcagctgacgtaccgggagctggatgcattggccgaccggctggccactgggctgcgccgcgcggacgtgagtcgcgagaccccggtggccgtcgcgctgtcccgtggtccgcgctacgtggccgccatgctggcggtcctcaaggcgggtggcatgatcgtgccgctggacccggcgatgcccggtgagcgtgtcgccgagatcttgcgccagacatcggctccggtggtcatcgatgagggcgtgttcgccgcttcggttggcgctgacatactcgaggaggaccgtgccatcacggtgccggtggaccaggcggcctacgtgattttcacctccggcaccaccggtaccccgaaaggtgtcatcggcacccatcgggcgctgtcggcctacgccgacgaccacatcgagcgcgtgttgcggccggcggcccagcggctcgggcgcccgctgcgaatcgcgcatgcctggtcgttcaccttcgacgcggcgtggcagccgttggtcgcactgcttgacggccacgcggtgcacattgtcgacgaccatcgtcagcgggacgcaggggcgctggtcgaagcgatcgaccgattcggtctggacatgattgacaccacgccgtcgatgttcgcccagctgcacaacgctggactgctcgaccgggcgccgttggcggtgcttgcgctcggcggcgaagccttgggcgccgcgacgtggcggatgatccagcagaactgcgcgcgcacggccatgacggccttcaactgctacgggcctaccgagaccacggtcgaagccgtggtcgccgccgttgctgagcatgcgcgaccggtcatcggacgtccgacctgcaccacccgcgcctacgtcatggactcctggctgcggccggtgcccgatggcgtcgccggcgagctgtatctggcgggcgcccagttgacccgcggttacctcggccgcccggccgagactgcggcgcgctttgtcgctgagccaaacgggcgcggtagccgaatgtaccgcaccggagatgtggtgcgccgcctgcccgacggtggactggagttcctcgggcgcagcgatgaccaggtgaagatccgcggtttccgcgtcgagccgggtgagattgccgcggtgctcaacggccaccatgcggtgcacggttgccatgtgacggcccgcggccatgccagtggcccccggctgacggcgtatgtggcaggcggaccacaaccgccaccggtggccgaattgcgggcgatgctgctagagcggttgccgcgttatctagtcccgcaccatatcgtcgtcctcgacgagttaccgctgactccacacggcaagatcgacgaaaacgctttggcggcaatcaatgtcaccgaaggaccggcaactccgccgcagacaccgaccgagctggtgctggccgaggcgttcgccgatgtcatggaaacctcgaacgtcgatgtcaccgcgggctttttgcagatgggtctagacagcatcgtggcgctgtcggtggtgcaggccgcgcgccgtcgtgggattgcgttgcgggccaggctgatggtggagtgcgacaccatccgtgaactcgcggcggccattgactccgatgccgcatggcaggcaccggccaacgatgccggcgagccgatcccggtgctacccaacactcattggctctacgagtacggcgacccgcgccggctggcacaaaccgaggtcatcaggttgcccgaccggatcacccgcgaacgcctggatgccgtgttggccgcggtcgtcgacggacacgaggtgttgcggtgccggttcgaccgggatgcgatggcccttgtcgcacaaccgaaaacggacattctcagcgaggtttgggtcagcggtgaactggtcaccgcggtggccgagcagactcttggcgcgctggcgagtctcgacccccaggccggccgactgctctcggcggtgtggctgcgcgaacccgacgggcccggtgttctggtgctgaccgcccatgtgctggcgatggacccagcctcctggcggattgtgctgggtgaactcgacgccggcctgcacgcgctggcggccgggcgcgcgcccagcccagcgcgcgagaacaccagctaccggcagtggtcgcggctgctggcgcagcgggctaaggcgctggatagcgttgatttctgggtcgccgaactcgagggcgccgatccgccgttgggtgcccgcagggtggcgccgcagaccgaccgggttggtgagctagcgatcaccatgtcgatctccgacgccgatctgaccgcgcggctgctttcgacgggacggtcgatgaccgatctgctggctaccgccgctgcgcggatggtgaccgcctggcgccggcaacgcggtcaacaaacaccagcaccgctgttggcgttggagacgcatggccgcgcggacgtccacgtcgataagactgccgacaccagcgacacggtcgggctgctcagcgcgatctatccgctgcgcatccactgcgacggcgcgaccgacttcgcgcggatacccggcagcggcatcgattacggcctgctgcggtacctgcgcgccgataccgcggagcgactacgcgcccaccgcgaaccccagctgctgctgaactatctgggtagcctgcacgtcggggtgggagatctggcggtcgaccgcgcactactggctgatgtggggcaactgcctgaacccgaacagccggtgcgccacgaactgacggtgctggcggcgctcctcgggcccgccgacgctcccgtgctagccacgcggtggcgcacgctgcccgacatcctgtccgccgacgacgtcgccacgctgcaatcactgtggcagggcgcgctggcggagataacagcatga

SEQ ID NO: 339 - DNA, 1698 bp, Mycobacterium Tuberculosis
atgccaccgaaggcggcagatggccgccgacccagtcccgacggcggactgggtggctttgtaccgttccccgcggatcgggccgcgtcgtaccgggcggccggctattggtcggggcgaaccctggacaccgtgctctccgatgccgcgcggcgctggcctgaccgcctcgcggtggccgacgccggtgatcgtcccggccacggcggcctcagttacgccgaactcgaccagcgggccgaccgggccgccgcggcgctgcacggcctgggcatcacgccaggcgaccgggtactgctccagctgccaaacggctgccagttcgcggttgccctgttcgcgttattgcgggcgggagcgatcccagtgatgtgcctgcccggtcaccgcgccgccgaattgggccacttcgccgccgtcagcgcggccaccgggctggtggtcgccgatgtggccagcgggttcgactatcggccgatggcgcgcgaacttgttgccgatcaccccaccctgcgccatgtcatcgtcgatggcgatccgggaccgttcgtgtcgtgggcgcagctgtgcgcccaggccggcaccggttcgccggcaccgccggccgatcccggatcgccagcgctgctgctggtctccggcggcaccactggcatgcccaaactcattccacgcacccacgacgactacgtgttcaacgcgacggccagcgccgcactctgtcggcttagcgccgacgacgtctatctggtggtgctggccgccggccacaatttcccgctggcctgcccgggcctgctcggcgcgatgaccgtcggggccaccgccgtgttcgcccccgatcccagcccggaggccgccttcgccgccatcgagcgccacggtgtcaccgtcaccgcgttggttccggcactggccaaactgtgggcccaatcctgtgagtgggagccggtgacaccgaagtcactgcggttgttgcaggttggcgggtccaagctagaacccgaggacgctcgccgggtacgcaccgcgctcaccccgggcctgcagcaggtgttcggcatggcggaggggctgctgaacttcacccgcatcggcgacccacccgaagtggtggagcacacccaggggcggccactatgcccggccgacgaactgcgcatcgtcaacgccgatggtgagccggtggggcccggggaggaaggcgaactcttggtgcgcgggccctacacgctgaacggctattttgctgccgaacgcgacaacgagcgctgcttcgatccggacggcttctaccgcagcggcgacctggtccgccgccgcgacgacggcaatctggtggtcaccgggcgcgtcaaggatgtcatctgccgtgcgggagaaaccatcgccgccagcgacctcgaagaacagctgctgagccatccggcgatcttctcggccgcggcggtgggactacctgaccagtatctgggggaaaaaatctgcgctgcagtcgttttcgctggagctccgattacgcttgcggagttgaacggctaccttgaccggcgtggtgtggccgcgcatacgcgacccgaccagctggtcgcgatgccggcgctgcccacaacgccgatcgggaagatcgacaaacgagcgatcgtccgccagctcggcatcgcgacgggtcccgtgacgacccagcgctgccattga

SEQ ID NO: 340 - DNA, 1353 bp, Mycobacterium Tuberculosis
gtgtccgagctcagcgtcgcgacaggcgccgtcagcaccgcgtcgtcgtccatcccgatgcccgccggtgtcaaccccgccgacctggcagcggagctggcggcggtggttaccgagtccgtcgacgaggattacctgctctacgagtgcgacggccaatgggtcctggccgccggtgtgcaggcgatggtggagctagacagcgacgaactgcgcgtcatccgtgatggcgttacgcggcgacagcaatggtcgggtcgcccgggagcggccctgggcgaagccgtcgatcggctgttgctggaaaccgatcaagcttttggctgggtcgccttcgaattcggcgtgcaccgctatgggttgcagcagcggctggcgccgcacaccccactggcccgggtgttttcgccccgaacccggatcatggtgagcgaaaaggagattcgcctgttcgatgctgggattcgccaccgcgaggccatcgaccgattactcgccaccggggtgcgagaggtgccgcagtcccgctccgtcgacgtctccgacgatccatccggcttccgccgtcgggtggcggtagccgtcgatgaaatcgctgccggccgctaccacaaggtgattctgtcccgttgtgtcgaagtgcctttcgcgatcgactttccgttgacctaccggctggggcgtcggcacaacaccccggtgaggtcgtttttgttgcagttgggcggaatccgtgctctgggttacagccccgaactcgtcacggcggtgcgcgccgacggagtggtgatcaccgagccgttggccggtacccgcgccttgggccgtggtcccgccattgaccgactggctcgtgatgacctggaatcaaactccaaagaaattgtcgagcacgccatttcagtgcgctcttcgcttgaggagattaccgacatcgccgaaccagggagtgctgcggtcatcgatttcatgacggtgcgcgagcgcggcagtgtgcagcacctcggctccaccatcagagcacggttggatccatcgagcgaccggatggccgccctggaagccctttttcctgctgtcactgcatccggaatcccgaaagcagctggcgttgaggccatctttcgcctcgatgagtgcccacgtgggctgtattccggtgcggtggtgatgctttcggcggatggcgggctagacgccgcgctgacgctgcgggcggcataccaggtcggcgggcggacttggctgcgggccggcgccggcatcatcgaagaatcggagccagagcgcgaattcgaggagacttgcgaaaagctatccacattgacgccttatctggttgcacgccagtaa

SEQ ID NO: 341 - DNA, 465 bp, Mycobacterium Tuberculosis
atgacaccgggtttgcttactactgcgggtgctggccgaccacgtgacaggtgcgccaggatcgtatgcacggtgttcatcgaaaccgccgttgtcgcgaccatgtttgtcgcgttgttgggtctgtccaccatcagctcgaaagccgacgacatcgattgggacgccatcgcgcaatgcgaatccggcggcaattgggcggccaacaccggtaacgggttatacggtggtctgcagatcagccaggcgacgtgggattccaacggtggtgtcgggtcgccggcggccgcgagtccccagcaacagatcgaggtcgcagacaacattatgaaaacccaaggcccgggtgcgtggccgaaatgtagttcttgtagtcagggagacgcaccgctgggctcgctcacccacatcctgacgttcctcgcggccgagactggaggttgttcggggagcagggacgattga

SEQ ID NO: 342 - DNA, 1692 bp, Mycobacterium Tuberculosis
atgtccgcgaaggagaacccccaaatgaccactgcacgtcccgccaaggctcgaaatgagggccagtgggcgctgggacatcgcgagccactcaacgccaacgaagagctgaagaaggccggcaacccgctcgacgtgcgggagcgcatcgaaaacatctacgccaaacagggtttcgacagcatcgacaagaccgacctgcgagggcgctttcgctggtggggcctgtacacccagcgtgagcagggctacgacggcacctggaccggtgacgacaacatcgacaagctcgaggccaaatacttcatgatgcgggtgcgttgcgacggcggcgcgctctcggctgccgcgctgcgcacgctgggccagatctcgacggagttcgcgcgcgataccgccgatatctccgaccggcagaacgtgcaataccactggatcgaagtggaaaacgtccctgaaatctggcgacggttagacgatgtcggactgcagaccaccgaggcgtgcggtgactgcccgcgggtagtgctgggctcgccgttggccggcgagtcgctcgacgaagtgctcgacccgacctgggcgatcgaggagatcgtgcgtcgctacatcggcaagcccgacttcgccgacttgccgcgcaagtacaagaccgccatctctggcctgcaggacgtcgcgcacgagatcaacgacgtcgccttcatcggcgtcaaccatcccgagcacggaccaggcctggatctgtgggtgggcggtggactgtcgaccaacccgatgctggcccagcgggtcggcgcctgggttccactgggcgaagtgcccgaggtgtgggcggcggtcacctcggtgtttcgcgactacggctaccggcgactgcgcgccaaggcccggctgaaatttctgatcaaagactggggcatagcgaagttccgcgaagtgctcgaaaccgagtacctcaagcgtccgctgatcgacggtccggcccccgaaccggtcaagcatccgatcgaccacgtcggggtgcaacgactcaagaacgggctcaacgccgtcggagtcgcccccatcgccgggcgggtatcgggcaccatcctcacggcggtcgccgacctgatggcgcgggccggttccgaccggatccggttcaccccctaccagaagctggtcatcctcgacattccggacgccttgctcgacgacttgatcgccggtctggacgcgctggggctgcagtcgcgcccgtcgcattggcgccggaacttgatggcgtgcagcgggattgagttctgcaagttgtcattcgccgaaacccgggttcgagcacagcatttggtgcccgagctggaacgccggcttgaggacatcaactcgcagctcgacgtaccgatcaccgtcaacatcaacggctgcccgaactcatgtgcgcgaattcaaatcgccgacatcggattcaagggacagatgatcgacgacggacacggcggctccgtcgaaggcttccaggtgcatctgggcggacacctcggcctggatgccggattcggccgcaaactgcgccagcacaaggtcaccagtgacgaactcggcgactacatcgaccgggtggtgcgcaacttcgtcaaacaccgcagcgaaggtgaacgcttcgcgcagtgggtcatccgggccgaggaggacgacctgcgatga

SEQ ID NO: 343 - DNA, 429 bp, Mycobacterium Tuberculosis
atgcgcatcgcggacgtcttgcggaacaagggggcggcggtggtgacgatcaaccccgacgccacggtcggggagctgctcgctggcctcgctgagcagaacatcggcgccatggtagtggtcggcgccgaaggcgtggtcggtatcgtgtcggaacgcgacgtggtgcgccagctacacacgtatggtgccagcgtgctgtctcgcccggtcgccaagattatgtcgaccaccgtcgccacctgtacaaaatccgacacggtcgacaagatcagtgtgctgatgaccgaaaaccgggtccgccacgtgccggtgctcgacgggaagaaactgatcggcatcgttagcatcggtgacgtggtgaaatcgcgcatgggagaactcgaggccgagcagcagcagcttcagtcctacatcactcagggctga

SEQ ID NO: 344 - DNA, 720 bp, Mycobacterium Tuberculosis
gtgctgatcgcacgtcccgatatcttatgcagtcgcggtccggaggcaatgcgggccaaagccgccgatttggacttggctgcggcggcaaagacggtcggagtgcagcccgccgccgatcaggtggcggcggcaattgccgcaatattgctgtcacacgcccagatctaccaggacatcagcacacagatggcggcattccacgaccagctcgtagagaaccgcacggcagatagcacgtcgtacgccagcgccgaggccaacgcccagcagagcctgctcaatgcgatggatgcaccgagctggcaacagcgccgagaaaccgtcggcgaggtggggctcccagcggacccagcgggatccggcacggcgacggcggcagtggcggcggcgacgacggcgcgggcaggaagccgttcggccgcccaggcaaccgtggcgcctatcggcgggctgaaactccgccgcgaatctgcgctaagccagccgggtgatctccaccaccacgtcgaggtcggtgacgccctccccagagtagatccctttcagcggggaaacgtcggtgtagtcgcggcctacacccacactgatgtattgctcggtgatctcattgtcattggtggggtcgtagtgccaccatccaccggtccaggcctgaacccaggcatggctgcgcccgtctaccgtctttcccaccacggcatcacgcttagggtgtag

SEQ ID NO: 345 - DNA, 1545 bp, Mycobacterium Tuberculosis
atgggcttcggcgcgtcccgtttggacgtacgcctggtcccggcggcgctggtcagctggattgtgacggcggccgggatcgtgtggccgatcggcaacgtgtgtgccttgtgctgcgtcgtggtggccctcggcggcggcgcactgtggtggtgtgtggcgcgccggtcgtggcacgctccgcgactgggttcgatcagcgccggcctggtcgcggtcggtatggtgggcgcggggtacgggcttgcggtcgcgttgcgctccgaggcggtcgatcgccacccaatcaccgtggcatttggcacctccgcgctggtcacggtcacccccagcgagagcccagtgtcgctggggcggggccggttgatgttccgggcgacggttcaacggctgcgggatgacgagacatccggccgggtagtggttttcgcgcgagcgctggacttcggcgagctgatggtcggacagcccgtccagttccgcgcgcgtatcagtcgcccggcgcgtcacgacctgacggtcgcggtgttcaatgcgaccggtcggccgaccgtgggccgtgccggcccggtacaccgcgccgctcacatcgtccgccatcgattcgcggccgcggttcgtgaggtgctgcccgctgaccaggccacgatgttgccggccctggttctcggcgatacctcgacggtcaccgccttaaccagccgcgagttccgtgcggcgggcctgacgcacttgacggcggtctcgggggccaatgtcacgatcgtgtgtgcggcggcgctggtttcggcacggttgatcggaccgcgtgcggccgtggtgtgcgcggccgtcgcgttggtggcattcgtcatcctggtgcagccgacggccagcgtgttgcgggcagctgtgatgggcgccattgccctcgtggggatgctgtctgcgcgccggcggcaggcgattccagctttgtcgggtagcgtgctggttttgctggctgccgctccccatcttgctgtggacatcggcttcgcgctgtccgtggcggccacgggtgcactggtcgtcatcgcgccggtttggtcacgccgcttggtcgaccgcggatgtccgaaggtgctggccgatgccctcgcagtcgcggcggccgcgcagctggtgacggcgccactggtggccgccatctccggccgggtcagtctggtggccgtggtggccaatctggcggtggcggccgtgatcgcgccgatcaccgtgctgggcagcgttgcggccgtgctggtcgtgccgtggccggccggcgcgcaggtgctgatccggttcaccgggcccgaagtgtggtgggtgttgcgcgtggcgcattgggcgtcgggtgtgcccgcggcgaccgttccggtggccgcaggtctgcccggcgtactgctggtcggtggcgccaccgtgttcacggttgcgcagtggcgctggcgctggtttcgcgcggccatgtgcaaaacgatggcggtggccgtcatatgtctgcttgcctggtcgctgtccgggctggtcggcccttcgtga

SEQ ID NO: 346 - DNA, 894 bp, Mycobacterium Tuberculosis
atgcgaacagaactgcccgccgagcgactgcaaaggcggctcggtgccgtcccggatatcgactcgcacgccgcatctgcacacttagacccggagccacacgatccaacggacgacggtccagaccacgacgagccacgcgacgatccgaactcgctgctgccgcgctggcttcccgacacttcccgtgggcaaggttgggcggacaggatacgcgcagatccgggccgtgccggcgccgtcgcattggcggtgatcgccgccctcgcggtgctggtgacggtattcaccttgatccgcgaccggactgagccggtaatgtcagccaaacttcctccggtagagccggtttcgccgacgaaccctaggtcgtcggcaagcccgggctcgccggaccgttccggcctgccggtggtggtcagcgtggttggcctggtgcacaccccaggactcgtcaccctggcgccgggcgcgcggatcgccgatgcgctacaggccgccggcggagcggtagacggcgcggacaccgtcggactgaacatggctcggcagcttggtgacggtgagcagatcgtggtcgggctagctccgccctcgggacagccgagggtgctgggcagctcggtcggtgcggggacgccgggaccggcgggtacctcgggcacagccacgacaggccctaagacagctcctaagacagctgaggtgctcgacctcaacactgcgaccgtggagcagctggacgccctgcccggcatcgggccggtcaccgccgcagcgattgtggcgtggcggcagcgcaatggtaggttcaccagcgtcgaccagcttgccgacgtcgacggcatcggtccggcgcggctggacaagcggcgcaatctggtccgtgtctga

SEQ ID NO: 347 - DNA, 744 bp, Mycobacterium Tuberculosis
atgtcctctaggcgcgggcgcaggcccgcattgttggtcttcgctgactcgctggcctactacgggcccaccggcggcctgcctgccgatgacccccgtatctggcccaatattgttgcttcccaactagattgggatttagagctgattggccgcatcggctggacctgtcgggatgtctggtgggcggcaacccaggatccgcgcgcttgggcggcgttacccagggccggagcggtgatcttcgcgaccggcggaatggattcgctgccgtcggtattaccgacggcgctgcgtgagctcatccgctatgtacgtccgtcttggctgcgacggtgggtccgcgacggctacgcctgggttcaaccgcgactgtcgccagtggcccgtgcggcgttgccgccgcacctgaccgctgagtaccttgaaaagacccgtggtgcaattgatttcaatcgtccgggcataccgatcatcgcatcgctgccctcggtgcatatcgccgagacctacggcaaggcccatcacggccgcgcaggcacggtggcggcgatcacggaatgggcacagcaccatgacattcctctagttgatctcaaagccgctgtcgcagaacagatattgagtggatatggtaatcgtgatggcattcactggaattttgaagcccaccaggcggtcgccgaactgatgctcaaggcactggccgaagccggggtgccgaacgagaaatcgcgcggctga

SEQ ID NO: 348 - DNA, 1443 bp, Mycobacterium Tuberculosis
gtggccgcccgtcgtattcgtgctgcccggccactcgccccgcatgggctgcccggacacttggtgggctttgtggaagcgctgcgtggcagcgggatttcggtgggcccgtcagagacggtggatgccggccgggtgatggccaccctcgggctgggtgatcgtgaggtgttgcgggagggcattgcttgtgcggtgctgcgccggcctgaccaccgcgatacctatgacgccatgttcgacctgtggtttcccgcggcactgggggctcgggcggtcatcaccacggaagacgagtcggcaggctccgggggtttgccgcccgatgatgtcgaggctatgcggcagctgctgctggatctgctggccaacaaccaagacctggccggcaaggacgagcggttggtggagatgatcgcgcggatcgttgaggcctatggcaagtacagttccagccgcggtccgtcgttctcgtcgtatcaggcactcaaggccatggcgctggacgaactggagggcaagctactggcgggcctgcttgctccctacggcgatgagcccacagccacccaggaacagattgccaaagcgcttgccgcacaaaagatcgcgcagctgcgcagaatggtcgacgccgagaccaagcggcgcacagccgagcaactcggccgcgagcacgtccagatgtacggaattccacagctttccgagaacgtcgagtttctgcgtgcctcgggtgagcagctgcgccagatgcgccgggtggtggccccgttggcccgcaccctggcgacccggttggccgcccggcggcgccgcgcccgcgcgggatcgatcgatctgcgcaagacgctgcgcaagtcgatgtccaccggcggcgtgccgatcgacctggtgttgcacaaaccccgcccggcgcgcccggaactcgtcgtgttgtgcgacgtgtcgggctcggtcgcgggcttcagccacttcacgctgctgctggtacacgcgctgcgccaacagttctcccgggttcgcgtcttcgccttcatcgactccaccgacgaggtgacccatatgttcgggccggaatcggacctggccatagcgatccagcggatcacccgggaggctggtgtgtatgcccgcgacggccattccgactacggcaacgcgttcgtctcgttcatgcagggcttcccaaatgtgctgtcgccgcgcagctcgctgctggtgcttggtgacgggcgcaccaactaccgcaacccggccaccgacgtgctggccgacatggtgaccgccagccggcacgcgcactggctcaacccggagcccaagcatctgtggggcagcggtgactcggcggtgccgcgctaccaagaggtgatcacgatgcacgaatgccgatccgccaagcagctggccacggtgatcgaccagctactgccggtgtag

SEQ ID NO: 349 - DNA, 876 bp, Mycobacterium Tuberculosis
gtgaccgtgcccgcccggcccacgccgctgttcgccgacatcgccgacgtctcgcggcggctggccgagaccggctacctgcccgacactgccaccgcgacggcggtctttctcgccgaccggctcggcaagccgctgctggtggaaggccccgccggggtcggcaagaccgagctggcgcgcgccgtggcgcaggccactggatccggtctggtccggctgcagtgctacgagggcgtcgacgaggctcgcgccctgtatgagtggaaccacgctaagcagatcctgcgtatccaggccggctcgggagattgggaggccaccaaaaccgatgtgttcagcgaagagttcctgctgcagcgtccgctgctgaccgctatccggcgcaccgagcccaccgtgctgctgatcgatgaaaccgacaaggccgacatcgagatcgagggcctgctgctggaggtgctgtccgacttcgcggtgaccgtccccgaactgggcaccctgaccgccacccgggcgccgttcgtgctgctgacctccaacgccacccgtgagctgtccgaggcgctcaagcgtcgctgcctgtacttgcacatcgacttcccgacccccgagctggagcgtcgcatcctgttatcccgagttcccgagctgcccgagcacttcgccgaggagttagtgcgcatcatcggcgtgctgcgcggcatgcagcttaagaaggtgccatcgatcgccgagaccatcgactggggtcgcaccgtcttggcactgggactggacaccatcgacgatgcggtcgttgccgccacgctcggcgtggttctcaagcaccaatccgaccagcaacgggccaccggagagctcaggttgaactag

SEQ ID NO: 350 - DNA, 588 bp, Mycobacterium Tuberculosis
atgccactgctaaccattggcgatcaattccccgcctaccagctcaccgctctcatcggcggtgacctgtccaaggtcgacgccaagcagcccggcgactacttcaccactatcaccagtgacgaacacccaggcaagtggcgggtggtgttcttttggccgaaagacttcacgttcgtgtgccctaccgagatcgcggcgttcagcaagctcaatgacgagttcgaggaccgcgacgcccagatcctgggggtttcgattgacagcgaattcgcgcatttccagtggcgtgcacagcacaacgacctcaaaacgttacccttcccgatgctctccgacatcaagcgcgaactcagccaagccgcaggtgtcctcaacgccgacggtgtggccgaccgcgtgacctttatcgtcgaccccaacaacgagatccagttcgtctcggccaccgccggttcggtgggacgcaacgtcgatgaggtactgcgagtgctcgacgccctccagtccgacgagctgtgcgcatgcaactggcgcaagggcgacccgacgctagacgctggcgaactcctcaaggcttcggcctaa

SEQ ID NO: 351 - DNA, 291 bp, Mycobacterium Tuberculosis
gtgggcctgcgcgacgctgacgagcggtgggacacggttggccaagcgatcggtctgtttctgcgcggccacaccctgcgcaccgcagctccgacggcgctgatcgtgggtaccgtgctatgtgcggtgaatcagggtgccacccttgccgagggcgccgcgacgatcggcacgtgggtacggatggtgatcaattatttggtcccgttcctggtggctagcgtcggctacctcggtgcgcggcgcggtgtccggcgtgcgagcggacgttctgatccatcagcacaatga

SEQ ID NO: 352 - DNA, 1446 bp, Mycobacterium Tuberculosis
atgaacctgctcgactcgacatggttctactgggccgttggcattgcgatcggattgccggccgggctaatcgttctcaccgaactgcacaacatactcgtccgacggaacagccatctggccaggcaggcaagtctgctgcgaaactacctgctacccctgggcgcggttttgctgctgcttgtcaaggcatctgaagtcccggccgaggaccccaccgtgcgggtgctcacgacagcgttcggatttctggtgctggtgctgctgctgtcgttactgaatgccaccctgtttcagggtgcgccccaacagagctggcgcaagcggctacccgccatcttcgtcgatgtcgcgcgcttcgcgctgatcggcataggtttggcggtgatcctgtcctacatctggggggtgcgggtcggtggactgttcgccgcgttaggtgtgacgtcagtcgtcatcggcctgatgctgcagaactccgtcggccagatcgtgtcgggcttgttcatgctgttcgaacagccctttcggatcgatgattggttggaaacacccacagcccgcggacgagtcgtcgaggtgaactggcgggctgtccatatcgacaccggcagcggactgcagatcatgcccaactcgatgttggccaccaccgcgtttaccaatctcagccggccggccggggcgcacgaatgctcgatcacgaccacattttccacgtccgatcccccggacaaggtatgcgccatgctgaacagggctgccagcgcgctaccgcatgttaagcccggggtcgtgcccgccacaattgcccgaggagccgccgagtatcgaacgacggtcaggctgacatcaccggccgacgaaggcccaacgcaggcaacgtttctgcgctgggtctggtacgccgcgcgtcgggaagggctacacctcgacgaggccgacgacgagttctcgacggccgaacgtgtggagtccgccctgcgcacggtggtggggcccgagctgcgactgagctctagcgatcagcagtcgctggctcggtacgcgaggctggtgcgctacggcactgatgagatcgtgcagcacgcgggtgtggttcccatgggtatcaccttcgtgatcgccggcagcgtgcggctgacggttacgaccgatgacggatccgtggttgcgattgccaccctcaaaaagggcacgtttctgggcttgactgcgctgactcggcaacccgaccccgccggtgcggtagcgctggaagaggtgaccgcgctgcagatcggccgggagcaccttgagcaggtcgtgatgaacaagccgatgctgctgcaggagctgggtcgggttatcgacgagcggcaaaggaaggcgcaacaggcaattcgccgcgacttgcaccaatccccagcggcggccggcgagcatcgtgggcctgcgcgacgctga

SEQ ID NO: 353 - DNA, 915 bp, Mycobacterium Tuberculosis
atggcaaacgccagtgagactaacgtcggccccatggcgccccgggtgtgcgtggtaggcagcgtgaacatggacctgacgttcgtggtggacgcgcttccgcgccccggcgagacggtgcttgcggcgtcgttgacccgaacgccaggcgggaagggcgccaaccaggcggtggccgcagcgcgcgcaggcgcgcaggtacagttctccggtgcattcggcgacgatccagccgccgcccagctgcgggcccacctgcgcgccaacgccgttggactggacaggaccgtcacggtgcccggaccgagcgggacggcgattatcgtggtcgatgccagcgccgagaacaccgtgctggtggcgccgggtgccaatgcacatctgactccggtaccctcggccgtcgccaactgcgatgtactgttgacccagttggagattcctgttgcaaccgcgctggcagccgcgcgggcagcccagtcggccgatgcggttgtcatggtcaacgcctccccagccggccaggatcgaagctccttgcaggacttggccgctatcgccgacgtggtgatcgccaacgagcatgaggcaaacgactggccgtcgccaccaacacatttcgtgatcaccctgggtgtgcgcggtgcccggtacgtcggcgcggacggggtgttcgaggtacccgccccaacggtaacgccagtggataccgccggcgccggcgacgtatttgccggggtccttgctgcgaattggccgcgcaacccaggttcgccggccgagcgactgcgcgcattgcggcgggcctgcgctgcgggtgcgctggcaactttggtgtccggtgtcggcgactgcgcaccggccgccgccgcgatcgatgcggccctgcgagccaaccgccacaacggttcatga

SEQ ID NO: 354 - DNA, 504 bp, Mycobacterium Tuberculosis
atgacgcatcggagttcacggttggaggtggggccagtggcacgtggtgacgttgcgacgattgagcacgccgagctgccgccgggttgggtgctgaccaccagcggacggatctcgggggtcaccgagcccggggaactgtccgtgcactacccgttccccatcgcagatctcgtcgccctggacgacgcgctgacctacagctcgcgggcgtgtcaggtgaggttcgccatctacctcggcgacttgggtcgtgacaccgccgcgcgggcccgcgagatcttgggcaaggtgcccacgccggacaatgctgtgctgctcgcggtctcgcccaaccagtgcgccatcgaagtggtctacggctcgcaagtccgcggccgcggtgccgagtcggcggctccgctcggggttgccgccgcttcctcagcgttcgagcagggtgagctggtagatgggctgatcagcgcgatccgcgtgctcagcgcggggatcgcgccgggctga

SEQ ID NO: 355 - DNA, 4875 bp, Mycobacterium Tuberculosis
atgacgatcgatcccggggctaagcaggatgttgaggcgtggaccacgttcaccgcgagtgcggacattcctgactggatctcgaaggcctacatcgacagctatcgaggaccgcgcgacgactcgtcggaagccaccaaggccgccgaggccagttggcttccagcctccctgctgacgcccgccatgctgggcgcacattatcggcttggccggcaccgcgcggccggtgaaagctgtgtcgccgtctatcgggcggacgatcccgcggggttcggtccggcgctgcaggtggtcgccgagcacggcggcatgctgatggattccgttacggtgctgctgcaccggcttggaatcgcctacgcggcgattctgaccccggtgttcgacgtgcaccgcagccccacgggagagctgctgcgcatcgaaccgaaggccgagggcacgtcgccgcacctgggtgaggcctggatgcacgtagcgctctcgcccgccgttgatcacaaaggcctcgccgaggtggagcggttgctgcccaaggtgctggccgacgtccagcgggtggccaccgacgccacagcgctgatcgccaccctgagcgagctggcgggagaagtcgaatccaatgccggcggccgattttccgcgcccgaccgacaagacgtcggggaactgttgcgttggctgggtgacgggaacttcctgctgctgggctaccaacggtgccgggtggctgacgggatggtctacggcgaggggtcaagcggtatgggcgtcctgcggggccgcaccggttcgcgtccccggctgaccgacgacgacaaactgctggtgttggcccaagcgcgggtcggcagctacctgcgttacggcgcctatccctatgccatcgcggtccgcgaatacgtcgacggcagcgtggtcgagcaccgcttcgtcgggctcttcagcgtcgcggccatgaatgcggacgtgctggagatcccgacgatctcgcgccgggtccgcgaggcgctggcgatggccgaaagcgatcccagccacccaggccaattgctgctcgacgtcatccagaccgtcccgcgaccggagctgttcaccctgagcgcgcagcgcctgctgaccatggccagggccgtggtggacttgggatcgcaacggcaggcgttgttgttcctgcgcgcggatcggttgcagtacttcgtgtcgtgcctggtctacatgccccgagatcgctacaccaccgccgtgcgcatgcaattcgaggacatccttgtccgcgagttcgggggaacacgactggagttcaccgctcgggtcagtgaatcaccttgggcactcatgcatttcatggtgcggctacccgaagtgggtgtggcaggagaaggggcggccgccccgccggtggacgtttccgaagccaaccggatccggatccagggtctgctgaccgaagccgcgcgaacctgggccgaccgtttgatcggcgcggcggcggcggctggctccgtcggacaggccgacgctatgcattacgctgccgccttctccgaggcctacaaacaggccgtcaccccggccgatgccattggcgacattgcggtcatcacggagctgaccgacgattcggtcaagctggtgttttccgaacgcgacgagcagggtgtcgcccagttgacctggttcctcggtgggcgcaccgcttcgctgagccagctgctgccgatgctgcaaagcatgggagtcgtggtgctcgaagagcgaccgttctccgtcacccggccggacggtctgccggtctggatctatcagttcaagatctcgccgcatcccacgatcccgttggccccgacggttgccgagcgggccgcgaccgcgcaccgattcgccgaggcggtgaccgcgatctggcacggccgggtcgaaatcgaccgattcaacgagctggtgatgcgtgccgggctgacttggcagcaggtcgtgctgctccgtgcctacgcgaagtacctgcgccaggcgggcttcccgtacagccagtcctacattgaatcggtgctcaacgagcaccctgctaccgttcggtctttggtcgatctgttcgaagcgcttttcgttccggtgccgtcggggtcggcgagcaatcgcgatgcccaagcggccgctgccgctgtcgccgcggacatcgacgcgctggtgagcctggacaccgaccggatcctgcgcgccttcgcgtcgttggttcaggccacgttgcgcaccaattactttgtgacacgccagggttcggcccgctgccgtgatgtattggcgctgaaactcaatgcccagttgatcgacgaacttccgctgccgcgtccccggtacgagatttttgtgtattcgccccgcgtcgaaggcgtgcatctgaggttcggcccagttgcgcgtggcgggttgcgctggtcggaccgccgtgacgatttccgaaccgagattctcggattggtcaaggcgcaagcggtgaagaacgccgtcatcgtgccggtcggggccaagggcgggttcgtggtcaagcgtcccccgctgcccaccggcgaccccgccgccgaccgcgacgccacccgcgccgaaggggtcgcctgctatcagctgttcatctccgggttgctcgatgtcaccgacaacgtcgatcatgcgaccgcaagcgtcaaccccccgcccgaggtggtgcgacgtgacggcgacgacgcctacttggtagtggccgccgacaaaggtactgccaccttttccgatatcgccaacgatgtcgccaagtcctatgggttctggctgggcgacgcgttcgcctcgggcggatcggtgggctacgaccacaaggccatgggcatcaccgcccggggggcctgggaggccgtaaaacggcatttccgagagatcgggatcgacacccagacccaggatttcaccgtcgtgggaatcggcgacatgagcggcgacgtattcggcaacggcatgttgctgagcaagcacatccggctgatcgccgccttcgaccaccgccacatcttcctcgaccccaaccccgatgccgcggtgtcgtgggccgaacgccggcggatgttcgagttgccccggtccagctggagcgactatgacaggtctctgatcagcgagggcggcggggtgtacagccgcgaacagaaagccatcccgctcagcgcgcaggtccgcgccgtcctcggcatcgacggctcagttgacgggggggccgccgagatggccccgcccaaccttattcgggcgattctgcgggcgccggtggacctgctgttcaacggcggcatcggcacttacatcaaggccgagtcagagtcggatgctgatgtcggcgatcgcgccaacgatccggtgcgagtcaacgcgaatcaagtgcgcgccaaggtcattggcgaaggtggcaatctcggagtgacggcgttgggccgtgtcgaattcgatctgtccggcggccggatcaacaccgacgcgctggacaactccgccggcgtggactgctcggaccacgaggtcaacatcaagatcctgatcgactcgctggtgagcgccggcacggtcaaagccgacgaacgcacacagctgctcgagtcaatgaccgacgaggtagcgcaactggtgctcgccgacaacgaagatcagaacgacttgatgggcaccagtcgcgccaacgcggccagcctgctgccggtgcacgcaatgcagatcaagtatttggtggctgagcgcggggtcaaccgcgaattggaagcgctgccgtcggagaaggagattgcccggcgctccgaggccggcatcgggctcacctcgcccgaactcgccacgctgatggcgcacgtcaagctggggctcaaagaggaggtgctagccaccgaactaccggatcaggatgtcttcgcttccaggttgcctcgttatttcccgacggcgctgcgcgaacggttcaccccggagatccgttcccaccagctgcgccgcgagatcgtcaccaccatgctgatcaacgatctggtggataccgccggcatcacctatgcgttccggatcgccgaagacgttggtgtcacgccgatcgatgccgtgcgcacctatgtcgccaccgatgccatcttcggtgtcggtcacatttggcgccggatccgtgcggcgaacctgccaatcgcgctgtcagacaggttgacgctggacacccgtcggctgatcgaccgtgccggacgctggctgctcaactaccgtccgcagcccttggccgtcggcgccgagatcaaccgattcgcggccatggtcaaggcactgacaccgcgcatgtcggagtggttgcgtggtgatgacaaggccatcgtcgaaaagacagctgcggaattcgcatcgcagggtgtgcctgaagacttggcctaccgtgtctcgaccggcctgtaccggtacagcctgctcgacatcatcgacatcgccgacatcgccgacatcgacgccgccgaggtcgctgacacctatttcgccctgatggaccggctgggcaccgatggcctgctgaccgcggtatcccagctgccccgacacgaccgctggcattcgttggcgcgcttggcgattcgcgacgatatttacggtgcgctacggtcgttgtgtttcgacgtgctggccgtgggggaacccggcgagagtagcgagcaaaagatcgccgagtgggaacacctcagcgcctcccgggtggcgcgggcacgtcggacactcgacgacatccgtgccagcggccagaaggatctggcgacgttgtcggtcgccgcgcggcagatccgccgcatgacacggacaagcgggcgaggaatctcggggtga

SEQ ID NO: 356 - DNA, 1677 bp, Mycobacterium Tuberculosis
atggctgagttcatctacacgatgaagaaggtccgcaaggcgcacggcgataaggtgatcctcgacgacgtgacgttgagtttctatccgggcgccaagatcggtgtcgtcggccccaacggggccggtaagtcgagcgtcttgcggatcatggccggtttggacaagccgaacaacggcgatgccttcctggccaccggcgccaccgtgggcatcctgcaacaggaaccgccgctgaacgaggacaagaccgttcgcggcaatgtggaagagggcatgggggacatcaagatcaagctcgaccgcttcaacgaggtcgccgaattgatggccaccgactacaccgacgagctgatggaagagatgggtcggctgcaagaggaactggaccacgccgacgcgtgggacctcgacgcgcagctcgagcaggccatggatgcgctgcgctgtccgccggccgacgagccggtaaccaacctatccggtggcgagcgtcgccgggtggcgctgtgcaaactgctgttgtccaaacccgacctgttgttgctcgacgagccgaccaaccacctagacgcggaaagtgtgcagtggctcgaacagcatctggccagctaccccggtgcgatcctggcggtcacccacgaccgttacttcctggacaacgtcgcggaatggatcctggagctcgatcgtggccgcgcctacccctatgagggcaactactcgacctatctggagaaaaaagccgagcggctcgcggtgcaaggccgcaaggacgcgaagctgcaaaagcggttgaccgaggagttggcttgggtccggtccggggccaaggcgcgccaggccaaaagcaaggcgcgcctgcagcgctacgaggagatggcagccgaggcggagaagacccgcaagctcgacttcgaggagattcagatcccggtcgggccccgcctaggcaacgtggtggttgaggtcgaccacctcgataagggctacgacgggcgcgccctgatcaaggacctgtcgttcagcttgccccgcaatggcatcgtcggcgtcattgggcccaacggggtaggcaagaccacactgttcaaaaccatcgtcgggctcgagacaccggacagcggcagcgtcaaggtcggcgagaccgtcaagctgagttacgtggaccaggcccgtgctggcatcgatccgcggaagaccgtctgggaggttgtctcggacggtctggactatatccaggtcggtcaaaccgaagtgccgtcacgggcctacgtgtcggcattcgggtttaagggaccggaccagcaaaaaccggccggtgtgctatccggcggggagcgcaacaggctcaaccttgcgttgacgctcaaacagggcggcaacctgattctgctcgacgaaccgacgaacgacctggatgtcgagactctgggttcgctggagaatgctctgctgaacttccccggctgcgccgtggtgatttcgcacgatcgctggtttcttgaccgcacgtgcacgcacatcctggcgtgggagggtgacgacgacaacgaggcgaagtggttctggttcgagggcaacttcggcgcctacgaggagaacaaggtggaacggctcggtgtcgacgccgctcgaccgcatagggtcacccaccgcaagctgacgcgcggctaa

SEQ ID NO: 357 - DNA, 4983 bp, Mycobacterium Tuberculosis
atgtcatatgtgatcgcgacgccggagatgatggcaactgcggcttttgatctggcgcgtattggttcgcaggtgagcgcggctagtgcggtcgcggcgatgccgacgacggaagtggtggccgccggcgccgacgaggtgtcggcgggcatcgcggcgttgttcagcgcgcacgctcaggagtatcaggcgctaagtgcgcaggccgcggcgtttcacgaccagttcgtgcacacgctgaccgcggccgcgaggtggtacacggccaccgagatcgccaacgccgcggcgatgcgagtcgtgctcggagccgtgaatgcgcccacccagacgctactgggacgcccgctgatcggcgatggtgcgcacgggacagcgcctgggcagcccggtggggccggtggattgttgttcggcaatggcggcaacggcgctgccggtgccgtcgggcaggtgggcggcgccggcggggcggccgggttatttgggatcggcggcgccggtggcgcgggcggggcgggcgcacccggaggtaccggcgggacgggtggatggctggcgggtgggggcggcgtcggcggtatgggtggggctggtggtggcgccggcggggcgggtggcaacgcgggcctgttcggcaacggcggcgccggtggtgccggtggggctggtggtggcgccggcggcgcgggcggtaacgcggggtggtttggtcatgggggcgctggcggcgtgggtggtgtaggtgcggccggggccaacggtgctacgcccggtcaggatggggcggctggtgttgccgggtcggacgacggtgccggcggtgacggtttggcagggtcggacgggggcgatggcggtgccggtggggtgggcggcaacggtggtcggggagggtggcttctcggtaacggcggcgccggtggcgttggcggtgtcggcggggccggtggtgccggtgcggccggcggtgccggcggtgccggggctaccggaataaatgggccggccggtatctcggcggccggcggtgacggcggcgccggcggcaatggcggtgccggcggaaacggcggcgtgggcggcgccgggggtgctggcgggtcggctggactattggggtatgtcggccgggccggagacggcggggctggcgggggtggggggctgggtggagcgcctggtgacggcggtgccggcggcaacggtggcagttggctggccgccggtgacggcggggccggcggtcacggtggcgacccgggcctgggtggggctggcggagccgggggggcgtcgggcggcgccggtgctcgcgcgggggccaatggtctggcggccggcaacgacgggccggtcagcggcggcaacggcggcaaaggtggcaatggcgcccacgcaccggtcgccggcggtcatggcggtaacggcggtgccggtggcaacggcgggttggtcggtgacggtggggccggcggtcatggcggtgacggagccgcgggtgccggctatgccgatatgacggcgatcttcctgggttcatccggtacccccggtgaggatggaggtaacggcggggccggtggggccggcggcgcgggtggggcccacgccggcgatggcggggccggcggtgccggcggcaacggtggggccggcggggccggtggtaacggagctcacggtttcaatgctgtgctcgtatctgacggcggcaacggtggtgatggcggagccggcggtcgcggcggtgacggtggggccggtggggctggcggtgacgcacctgcgggtcgggcgggcagccagggtgttggcggggacggtggtgccggcggggctggtggggcgcccggtaacgggggcagcggtggccgcggcgacatggctttcaaggatggtgacggtggggccggcggcgatggtggtgacccaggcgccggtgggaagggtggcgccggcggcgccggcgccaccgagggtgtgaccggcgcgaccggcgctaccgtgcacagtggtggcaacggcggcaagggcggtaacggcgccgacgccaccgtggctggcgcgaacggcggcaagggcggtgccggtggtaacggcgggttggtcggtgacggcggggccggcggcgacggtggtagcggcgcggccggtgcgaatggcgcgaacgtaggtgaggacggcgccgacggcaccctctcggggcaaccgggcgaaggaagcgaggccaacggcggtcaaggcggcgttggcggtggcggcgcgggcggtgccggcggtgacggtggtgccgggagttcggcgttaggtagtggcggcaacggcggtcgaggcgatgcggggcaggccggcggcgcgggcggtgccggcggagccggtggcgccggtgggtcggtgtcgggcgacggtggacccggtggcaagggcggggccggcggtgcgggtggtgccggagctagtggtggcggcggcggcaagggcgcctccggcgccgacagcgctgaggccgttggaggcgccggcgggaaaggcggcgacggcggtgtcggcggcgttggcggtgacggcgggcccggcggtgatggcggcgccggcggggccgcacccgcgggtcaggtcggcagccacggtgtcggcggcgttggcggtgacggcgggctcggcggagccggcggcaacggcggtgacggcggtcatggcagtgatggcggggacggcggtgacggcggtgaccccggcgcgggaggcctcggcggcttgggcggcgacagcggcaacggcacccgcgcggccagcggtgtggacgccagcgaccacgggcccggcagcggcggcaacggtggtaacggtggcaacggtgcgcaagccagcgtcgcgggcggcgccgggggcaacggaggcgacggcggcaatgccggccgggtcggcgatggtggcgccggcggcaatggtggcgatggcgcggccggcgccaacggggccaattcgggcgcgcctggttcagatgccctcgccctcggccaaccgggaggcaacgggggtcagggcgacgcggggcaggccggcggtgccggtggtgccggtggtgccggtggcgccggtgggtcggtgtcgggtgacggcggtgccggcggcaacggcggggccggcggcaacggcggtgtgggcgctagcggtggggccggggccaggggcgccaacggtatcgacagtatcggcggcaccggtggggccggcggtggtggcggcgatggcggtgccggcggggtcggtggacatggcggggacggtggggtcggcggggccgcaccttcggggacggtcggcagtcacggcaccggtggggtcggtggcgacggcggactcggcggcgccggcggcgttggcggggccggcggcaacggcggcattggtatcaccgtcggcggcgccggcggagcgggcggtaacggcggtgaccccggcgcaggcggtcgcggcggtctggggggtgacagcggcaacggcacctccgcggccaacggcgtggacgccagcaaacacgggccactgaccggcggcgacggcggcgtcggcggcaacggtgccaaggccgccgcggccggcggcgacggcggccagggcggtgacggcggcaacgccgggctattcggggacggcggagccggtggtgatggggccgacggcaccgctgccgaagctctcggcggtgatggcggggccggtggggctggaggcaagggcggtgacgccggcgacatcggtgacggcggtgacggcggcaagggtggcgacggcgcgcacggtgccctcggagggctcaccgttgctggcggcaacggtggggctggtggcgccggtggggctggtggcgccggcggagcatttctgggcgacggcgggaacggcggagccggcggccaaggtggggctggccggggcggcagccccggcggcggcggcggggttggtggacacggcggggcgggcggcgacgccgggatgaacggcggcggcggaaccggcggccagggaggcaacggcgcggccggtggcgcgggttggtcgcccgactccgacctaaagggcttcgacggcttcgacggcggcagcggtggggcgggaggcgacggcggggccggtggcgccggcggaactcagaccggcgacggtggtgacggcggggccggaggcctaggcggggctggtggggtcggcggtaacggcgttgacggctttgacattaacgaaacgacgggccgcgacggcggcgacggcggcgacggtggctacggcgggtggggcggcgccggcggaaacggcggggccggcgggtcggcacccgccggcgaggtcggcaatcgaggcgttggcggggacggcggtgacggcgggtcgggcggggacgctggtaatggtggcttgggcggtgacggctttacctatctcgcggattttgacggagagcctggcggcgacggaggtgacggcggcgacggcgggtggggccgccccggcggacaaggcggtttcggttccacaagtggcgcgcacggcaaggccggcttcggcgcccccggcggtgacggaggcgacggcgggaacggcggtcacggtggggacggcaacggcagctttgctgatgcaggcgacggcgggccgggtggcaacggcggcaacggcggcttgggtggggccgggcgagacggtggcgcccccggtggtgacggaggcgacggcgggaccggcggctccggcggcttcggcgcccctccgcctcgcagcatcggcggcggtgacggcggggacggcgggcgcggaggtgacggcggacgcggtgccggtggcttgacctccggcggcgtcggctcgtcgggcgagtcgggtggctccggcaacgggaggggcgaccctggctccggcggttccggcggtgaaggcggcgaaggcggcccctccatctccgttaacgtcacgtag

SEQ ID NO: 358 - DNA, 1182 bp, Mycobacterium Tuberculosis
atgagcggtgaggacagcatcaggtctttcccggtgcccgacctcggcgagggactgcaggaagtgacggtgacgtgttggagcgtcgccgtcggcgacgatgtggagatcaaccagacgctgtgttcggtggagaccgccaaggccgaggtcgaaatccccagcccgtatgccggccggatcgtcgagttaggcggcgccgaaggcgatgtgctcaaagtgggcgcggagctagttcggatcgacaccgggcccacggcagttgcgcagcctaacggtgaaggagcggtccccacgttggtcggctacggtgccgacaccgcgatcgaaaccagtagacggacaagccggccgctggcggcaccggtagtgcgcaagctggccaaagagttggcggtcgacctggccgcattgcagcgtgggtcgggcgccggcggtgtgatcacccgggccgatgtgctggccgctgctcgaggcggcgtcggagccgggccggacgtgcggccggtccacggcgtgcacgcgcggatggccgaaaaaatgacgttgtcccacaaggagattccgaccgcaaaggccagcgttgaggtaatttgcgccgaactgctgcggctgcgcgaccggttcgtttcggcggcgcccgagattacaccgttcgcgctgacgctgcggctgctggttattgcattgaaacacaacgtaattctcaactcgacgtgggtcgactcgggcgaaggcccgcaagtacacgtgcatcgcggtgtgcatctggggttcggcgcggccactgagcgtggattgctggtgccggtggtgaccgacgcccaggacaagaacacccgcgaacttgcctcccgcgtagcggaattaatcaccggcgcacgtgaaggcactctcacacccgcggagctgcgcggttcgacgttcacggtgtcgaacttcggggcgctgggagtcgacgacggcgtgccggtgatcaaccatcccgaagcggcgatcctgggtctgggggcgatcaagccgcgcccggtggtcgtcggcggcgaggttgtcgcacggccgacgatgacgttgacttgtgtgttcgaccaccgcgttgtcgatggtgctcaggtggcccagttcatgtgtgagctgcgggatctgatcgagtcgccggagaccgcgctgttggatctgtag

SEQ ID NO: 359 - DNA, 9210 bp, Mycobacterium Tuberculosis
gtgacgatccacgagcacgaccgggtgtccgctgatcgcggcggggacagcccgcataccacccacgctctggtcgatcgcctcatggctggtgagccctacgctgtcgcattcggtggccagggcagcgcctggctggaaaccctcgaagagctggtgtcggccaccgggatagaaaccgagttggcgacgttggtcggtgaggcagagctgttgctcgatccggtcaccgacgagctgattgtggtgcgcccgatcggtttcgagccgctgcaatgggtacgcgcactggcggccgaggacccggttccgtccgacaagcacctgacgtcggccgccgtgtcggtgcccggcgtgttgcttacccagatcgcggcgacccgggcgctggcccgtcaaggcatggacctcgtggccaccccgccggtcgccatggcggggcattcgcaaggtgtgctggcggtggaagccctcaaggctggtggggcacgcgacgtcgagctgtttgccttggcccagttgatcggtgccgccggaacgctggtggcccgccggcgcggaatttccgtcctgggcgatcgcccgccgatggtatcggtcaccaacgccgaccccgagcgcatcggccggttgctcgacgagttcgcccaggacgtgcgcacggtgctgccaccggtgttgtccatccgcaacggccggcgtgccgtcgtcatcaccggcacccccgagcagctgtcgcgtttcgagctttattgccgccagatctccgagaaggaagaagccgaccgcaagaacaaggtccgcggcggcgacgtcttctcgccggtcttcgagccggtgcaggtggaggtgggctttcacaccccgcggctatccgacgggatcgacatcgtcgcgggctgggccgagaaggcgggcctcgatgtcgccttggctcgggagctggccgatgccatcttgatcagaaaggtcgactgggtcgacgagatcacccgtgtccacgcggccggcgcccgctggatcctcgacctggggccgggcgacatcctgacccgactgaccgcaccggtgatccgcggcctgggcatcggcatcgtgccggcggctacccgcggtggccagcgcaacctgttcaccgtcggcgccacccccgaggttgcccgggcctggtcgagctacgcaccgaccgtggttcgcctccccgacggcagggtcaagctctcgacgaagttcacccggctgaccggccgctcgccgatcctgctcgcgggcatgaccccgaccaccgtggacgccaagatcgtcgccgcggcggccaacgccgggcactgggccgagctggccggcggcgggcaggtcaccgaagagatcttcggtaaccgcatcgaacaaatggccggcctgctcgagccgggccgcacctatcagttcaacgcgctgttcctcgatccctacctgtggaagcttcaggtgggcggcaagcggttggtgcagaaggcccgccagtccggcgccgcgatcgacggcgtggtgatcagcgccggcatcccagacctcgacgaggccgtcgagctgatcgacgaactgggcgacatcggcatcagccacgtcgtgttcaaacccgggaccatcgagcagatccgctcggtgattcgcatcgccaccgaggtgcccaccaagccggtgatcatgcacgtcgagggcgggcgcgccggcgggcaccattcctgggaggatctcgacgacctgctgctggctacctactcggagttgcgctcacgcgccaacatcacggtgtgcgtcggcggcggcattggcaccccgagaagggctgcggaatatttgtccgggcgctgggcgcaggcctacggcttcccattgatgccgatcgacggcatcctggtcggcaccgcggcgatggccaccaaggaatccaccacgtcgccatcggtcaagcggatgctcgtcgacactcagggcaccgaccaatggatcagcgccggaaaagcgcagggcggcatggcctccagccgcagtcagctcggtgccgatatccacgagatcgacaacagcgcatcccggtgcgggcggctgctcgacgaggtggccggtgacgcggaggcggtcgcggagcgtcgcgacgagatcatcgcggcgatggccaagaccgccaagccctacttcggcgacgtcgccgacatgacctacctgcagtggctgcggcgctacgtcgaactggccatcggggaaggcaactcgaccgccgacaccgcctcggtgggcagcccgtggctggccgacacctggcgggaccgcttcgagcagatgctgcagcgtgccgaagcccggttgcacccacaggatttcggcccgatccagacgctattcaccgatgctggcctgctggacaatccgcagcaggcgatcgccgccctgctggcgcgctaccccgacgccgagaccgtgcagttgcatcccgcggatgtgccctttttcgtgacgttgtgcaagacgctgggcaagccggtcaacttcgtgccggtgatcgaccaggacgtgcggcgctggtggcgcagcgactcgctgtggcaggcccacgacgcccgctacgacgccgatgcggtgtgcatcattccgggcaccgcgtcggtagccggcatcacccggatggatgaacccgtcggtgagttgctggaccgtttcgagcaagccgcaatcgatgaagtgctcggcgccggtgtcgagccgaaggatgtcgcgtcgcgccggctgggccgcgccgacgtggccggaccgttggctgtcgtcctcgacgcacccgatgtgcgctgggccggtcgcaccgtgaccaacccggtgcatcggatcgccgacccggccgaatggcaggtgcacgatggacccgaaaacccgcgcgccacacactcatccaccggcgcccggctgcagacgcacggcgacgacgtcgccttgagcgtgcccgtctcgggcacctgggtcgacatccgattcacgttgccggccaacaccgtcgatggcggcaccccggtgatcgccaccgaggacgccaccagcgccatgcgcacggtgctggcgatcgccgccggtgtcgacagcccggagttcttgcctgcggtggccaacgggacggccactttgacggtggactggcaccccgagcgtgttgccgaccacaccggcgtcaccgccacgttcggtgagccgctggcacccagcctcaccaacgtgcccgacgcgctcgtcggcccttgttggccagcggttttcgcggccatcggatcggcggtcaccgacaccggtgagccggtggtggaaggcctgctgagcctggtgcatctggaccacgccgcccgcgtggtcggtcagctgcccacggtcccggcccaattgaccgtcaccgcaacggctgccaacgcaaccgatacggacatgggccgcgtcgtgccggtctcggtcgtcgttaccggcgccgatggcgccgtgatcgccactctcgaggagcgattcgcgatcctgggtcgcaccggttccgccgagctcgccgacccggcgcgagccggtggcgcggtgtcggcgaacgccaccgacaccccgcgccgtcgccgccgcgacgtcacgatcaccgcgccggtcgacatgcgcccgttcgcggtggtgtccggcgaccacaaccccattcacaccgaccgggccgccgcgctgcttgccggcctggagtcgccgatcgtgcacggcatgtggctgtcggccgcggcgcaacacgcggtgaccgccaccgacgggcaggcccggccaccggcccggctggtcggctggaccgcgcggtttttgggcatggtgcgccccggcgacgaggtggacttccgcgtcgagcgcgtcggaatcgaccagggcgcagagattgtggacgtggccgcgcgcgtcgggtcggatctagtgatgtcggcctccgcgcgactggccgcacccaagacggtctacgcattccccggccagggcatccaacacaagggcatgggcatggaggtgcgcgcccgctccaaggcggcccgcaaggtgtgggacaccgcggacaagttcacccgcgacaccctgggcttctcggtactgcacgtggtccgcgacaacccgaccagcatcatcgccagcggtgtgcactaccaccaccccgacggggtgctctacctgacgcagttcacccaggtcgcgatggcgacggtggcggccgcgcaggtcgccgagatgcgtgaacagggagccttcgtcgaaggcgccatcgcgtgcggccactcggtcggcgagtacaccgcgctggcctgcgtgaccggcatctaccaactggaagccttgctggagatggtgtttcaccgcgggtcgaagatgcacgacatcgttccgcgcgacgagctcggccgctccaactatcggctggcggccatccggccgtcccagatcgacctcgacgacgccgacgtgcccgcgttcgtcgccgggatcgcggagagcaccggtgaattcctggagatcgtgaatttcaacctgcgtggctcgcaatacgcgatcgcgggcacggtacgcggcctcgaggcgctcgaggccgaggtggagcggcgccgcgagctcaccggcggccgacggtcgttcattttggtgcccggcatcgatgttccgttccactcgcgagtgctgcgggtcggggtggccgaattccggcgctcgctggaccgggtcatgccgcgcgacgcggaccccgacctgatcatcgggcgctacattcccaacctggtgccgcggttgttcaccctggaccgcgacttcatccaggaaatccgggatttggtgcccgccgagccgctcgacgagatcctcgccgactacgacacctggcttcgcgagcgtccgcgcgagatggcgcgcacggtgttcatcgagctgctggcatggcaattcgccagcccggtgcgctggatcgagacgcaggatctgctgttcatcgaggaggccgccggcgggctgggtgtggagcgattcgtcgagatcggtgtgaagagctcaccgacggtggcgggtcttgccaccaacaccctcaaactgcccgaatacgcccacagcacagtggaagtgctcaacgccgagcgtgatgccgcggtgctgttcgccaccgacaccgacccggagccggagccggaggaagacgagccggtcgcggaatcgcccgcgccggacgtcgtctcggaagccgcccccgtcgcgccggccgcttcgtcggcgggcccgcgtcccgacgatctggttttcgacgccgccgatgccacgctggcgctgatcgcgctctcggccaagatgcgcatcgaccagatcgaagaactcgactccatcgagtccatcaccgacggtgcgtcgtcgcggcgcaaccagctgctggtggacctgggctccgagctgaacctcggtgccattgacggcgccgccgaatcggacctggccggtctgcgctcacaggtgaccaaactggcgcgcacctacaagccttacggcccagtgctttccgacgccatcaacgaccagcttcgcaccgtcctcggaccgtcgggcaagcggcccggcgccatcgccgagcgggtgaagaagacctgggagctcggtgagggctgggccaagcatgtcaccgtcgaggtcgcgctgggcacccgcgagggcagcagcgttcgcggcggcgccatgggccacctgcacgagggcgcgctggccgatgccgcctccgtcgacaaggtcatcgacgcggcggtcgcatcggtggccgcgcgccagggcgtttcggtagcgctgccgtcggccggtagtggtggcggcgccaccatcgacgcggccgcgctcagcgagttcaccgaccaaatcaccggccgtgagggcgtgctggcctccgcggcccgcctggtgctggggcagctgggactggacgaccccgtcaacgccttgccggccgcccccgattccgagctgatcgacttggtcaccgccgaactgggagcggactggccgcggttggtggcaccggtgttcgaccccaagaaggccgtcgtattcgacgaccgctgggccagcgcccgcgaggacctggtgaagctgtggctgaccgacgagggcgacatcgacgccgactggccgcgcctggcggagcgcttcgagggtgccggccacgtcgtggcgacccaggctacctggtggcaaggtaagtcgctggccgcgggccggcagatccatgcatcgctgtacggccgcatcgccgccggcgccgagaaccccgaacccggccgctacggcggcgaagttgccgtggtgaccggcgcttcgaagggttcgatcgccgcgtcggtggtggctcggctgctcgacggcggagccaccgtcatcgcgaccacctccaagctcgacgaggagcggctggcgttctaccgcacgctgtatcgcgaccacgcccgttacggcgcggcgctgtggctggtcgcggcgaacatggcgtcctactccgacgtcgacgccctggtcgaatggatcggcaccgaacagaccgaaagccttgggccgcagtcgattcacatcaaagacgcgcagaccccgacgctgctgttcccgttcgcggcgccacgcgtggtcggggacctgtcggaggccggttcgcgcgccgagatggagatgaaagtgctgctgtgggccgtgcaacggctgatcggcggcctgtcgacgatcggcgccgaacgcgacatcgcgtcgcggctgcacgtggtgctgcccggctcgcccaaccgtggcatgttcggcggcgacggcgcctacggcgaagccaagtccgcgctggatgccgtggtgagccgctggcacgccgagtcgtcctgggcggcacgggtcagcctggcgcacgcgctcatcggctggacccgcggcaccgggctgatgggccacaacgatgccatcgtggccgccgtcgaagaggccggggtcaccacctactcgaccgacgagatggcggcgctgctgctcgacctgtgtgatgcggaatccaaggtggctgcggcgcgttcgccgatcaaggccgacctgaccgggggcctggccgaggccaacctcgacatggccgagctggcggccaaggcgcgcgagcagatgtcggcagcggcggccgtcgacgaggacgccgaggcccctggcgccatcgccgcgctgccgtcgccgccccggggtttcacccccgcaccgccgccgcaatgggacgacctcgatgtcgacccggccgacctggtggtgatcgtcggcggcgccgaaatcggcccgtacggctcgtcacgcacccggttcgagatggaggtcgaaaacgagctgtcggcggccggcgtgctggagctggcctggaccactgggttgatccgctgggaggacgacccgcaacccggttggtacgacaccgaatccggcgaaatggtcgacgaatccgagttggtgcagcgctaccacgacgccgtggtgcagcgcgtcggcattcgcgaattcgttgatgacggcgcgatcgaccccgaccacgcctcgccgctgctggtgtcggtgttcctggagaaggacttcgcgttcgtggtgtcctcggaggccgatgcgcgcgccttcgtcgagttcgatcccgagcacacggtcatccggccggtgcccgactccaccgactggcaggtcatccgcaaggccggcaccgagatccgggtgccgcgaaagaccaagctgtcccgcgtcgtcggcggccagatcccgaccgggttcgacccgacggtgtggggcatcagcgcagacatggccggttccatcgaccggttggcggtatggaacatggtggcgaccgtcgacgcgttcctgtcgtccggtttcagcccggccgaggtgatgcgttacgtgcacccgagtttggtggccaacacccagggcaccggcatgggcggcggcacgtcgatgcagacgatgtaccacggcaatctgttgggccgcaacaagccgaacgacatcttccaggaagtcttgccgaatatcattgccgcgcacgtggttcagtcctacgtcggtagctacggtgcgatgatccacccggtagccgcgtgcgccaccgccgcggtgtcggtcgaggaaggtgtcgacaagatccggttgggcaaggctcaactggtggtggccggcggcctggatgacctgacgctggagggcatcatcggattcggtgacatggccgccaccgccgacacgtccatgatgtgcggccgcggcatccacgactcgaagttttcccggcccaacgaccgccgccgtctgggcttcgtcgaagcccaaggcggcgggacgatcctgttggcccgcggggacctggcgctgcggatggggctgccggtgctggcggtggtggcgttcgcgcagtcgttcggcgacggcgtgcacacctcgatcccggccccgggcctgggcgcgctgggggcgggccgcggcggcaaggattcaccgctggcgcgggcgctggccaagctgggcgtggccgccgacgacgtggcggtcatctccaagcacgacacctcgacgctggccaacgatcccaacgagaccgagttgcatgaacggctcgccgacgccctgggccgttccgagggcgccccgctgttcgtggtgtcgcagaagagcctgaccggccacgccaagggcggcgcggcggtcttccagatgatggggctctgccagatattgcgggatggggtgatcccacccaaccgcagcctcgactgcgtcgacgacgagctggccggctccgcgcatttcgtgtgggtgcgtgacacgttgcggctcggcggcaagttcccactcaaggccggcatgctgaccagcctcgggttcggccatgtgtcgggcctggtcgcgttggtgcatccgcaggcgttcatcgcctcgctggatcccgcacagcgcgcggactaccagcggcgtgccgacgcccgcctgctggccggtcagcgccggctggcctcggcgattgccggtggtgcgccgatgtaccagcggcccggtgaccgtcgcttcgaccaccacgcgcccgagcggccgcaggaggcgtcgatgctgctgaatccggcggcccggctgggtgacggcgaggcgtatatcggctga

SEQ ID NO: 360 - DNA, 402 bp, Mycobacterium Tuberculosis
atgaccacctggattctggacaagagtgcccacgtgcgactcgtggccggcgccacgccgccagccggcatcgacctcaccgacctcgccatctgcgatatcggcgaacttgaatggctgtattcagcacggtcagctaccgactacgacagccaacaaacgtcactgcgcgcctatcaaatccttcgcgcacccagcgacatctttgaccgggttcgccaccttcagcgcgacctagcccaccaccgtgggatgtggcatcgaacgccgcttccggacctattcatcgccgaaaccgcgcttcatcaccgggccggcgtgttgcaccacgaccgtgactacaaacgaattgccgtcgtacggcctgggtttcaagcatgcgaactctctcgcgggcgctag

SEQ ID NO: 361 - DNA, 693 bp, Mycobacterium Tuberculosis
atgactaactggatgctgcgcgggttggcgttcgccgccgcgatggtggttctccgcctgttccagggggcattgatcaacgcgtggcagatgctgtccgggctgatcagcctggtgctactgctgctcttcgcgatcggaggggtggtgtggggtgtgatggacgggcgcgccgacgccaaggcgagccctgaccccgaccgccgccaagacctggccatgacctggctgttggccggcctggtagccggcgcgctcagcggcgcggtggcctggctcatttcgctgttctacaaagcgatctacaccgggggcccaatcaacgagctgaccacgttcgcggccttcaccgcgctcatcgtctttctggtcgggatcgtcggggtagccgtgggccggtggctggtggaccggcagctggcgaaggcaccggtgcgacaccacgggcttgccgctgaacacgagcgggccgccgacaccgatgtattctccgccgttcgcgccgacgacagtccgaccggggagatgcaggtcgcgcagcctgaggcacaaaccgcggccgtcgccacggtcgaacgtgaggcacccaccgaggtgatccgcaccaccgaaagcgatacacccaccgaggttatccgcaccgacaccgaggcggaccagaccaagcccggcgacgagcccaagaaggattaa

SEQ ID NO: 362 - DNA, 1089 bp, Mycobacterium Tuberculosis
atgaccgatatcggcgcacccgtgaccgtgcaggtggccgtcgatccgccatacccggtggtcatcggtaccggcctgctcgacgagctggaagacctgctggccgaccggcacaaggtcgccgtcgtgcatcagcccggactagccgagaccgcggaagagatccgaaagcgcttggccggcaagggcgtcgacgcgcaccgcatcgagatccccgacgccgaggccggcaaggacctgcccgtcgtgggattcatctgggaggtgttgggccgcatcggaatcggccgcaaagacgccctggtcagcctcggcggcggggccgccaccgacgtcgccgggttcgcggcggccacctggctgcgcggcgtctcgattgtgcacctgcccaccacactgctgggcatggtcgatgcggccgtcggcggcaagaccggcatcaacaccgacgccggcaagaacctggtcggggcgtttcatcagccgttggcggtcctggtggacctggcgacgctgcaaaccttgccacgcgacgaaatgatctgcggcatggccgaagtggtcaaggccggcttcatcgccgacccggtgatcctggatctcatcgaagctgacccgcaggccgcactcgacccggccggcgacgtgctgcccgagctgatccggcgcgcgatcaccgtcaaggccgaggtggtcgccgccgacgaaaaggaatccgagctgcgcgaaatcctcaactacggccacacattaggccacgcgatcgagcgccgggaacgctaccggtggcgccacggcgccgccgtgtcggtggggctggtgttcgcggccgagctggccaggcttgccgggcggctcgacgacgcgaccgcgcagcgccaccgcaccatcctgtcctcgttgggattgccggtcagctacgacccggacgcgctgccccagctgctggaaatcatggccggcgacaagaagactcgggcgggtgtgttgcggttcgtggtgctcgacggattggccaagccgggccgaatggtgggaccggaccccggtctgctggtaaccgcctacgccggagtttgcgccccatga

SEQ ID NO: 363 - DNA, 663 bp, Mycobacterium Tuberculosis
ttgatcgcaccacaaccgattccccgaacgctcccacggtggcagcgcatcgtcgcgctgaccatgatcggcatatcaaccgccctgataggtggctgcacaatgggccaaaaccccgacaaatcaccgcacctgaccggcgagcagaagatccagctcatcgacagcatgcgccacaaaggctcctacgaggccgcccgggaacgcctcaccgccaccgcccagatcatcgccgaccgcgtcagtgcggccatcccgggccaaacctggaaattcaacgacgactcctacggccaagacttctatagaaatggatcgttgtgtaaggaactcagtgccgatatcgcccggcggccgatggccaaaccggttgacttcggtagcacattctcggcggaagacttcaagattgccgccaatatcgtgcgagaggaagccgccaagtacggtgtgaccaccgagtcgtcgctgtttaacgaatcggccaaacgcgactacgacgtgcagggcaacggctacgaattcaacctgggccaaatcaaattcgccacacttaacatcaccggcgactgttttctgttgcagaaggtgctcgacctgccggccggacaactcccccccgaaccacccatttggccgacgacctcgacgccaaccccgtga

SEQ ID NO: 364 - DNA, 1050 bp, Mycobacterium Tuberculosis
atgctttttgcggctttgcgtgatgtccaatggcgaaaacgacgccttgtcatcgcaatcgtcagcaccggcctagttttcgcgatgacgctcgttctgaccggacttgtgaacgggtttcgggtcgaggccgagcgaaccgtcgattccatgggtgtcgacgcattcgtggtcaaggccggcgcggcaggaccgttcctgggttcgacaccattcgcccaaatcgacctgccccaggttgctcgtgcgcctggcgtcttggctgccgccccactagcgactgcgccgtcgacgatccggcagggcacgtcagcgcgaaacgtcaccgcgttcggggcaccagagcacggacccggcatgccgcgggtctcggacggtcgggcgccatcgacgccggacgaggtcgcggtgtcgagcacgctgggccgaaacctcggcgacgatctgcaagtgggtgcgcgcactttgcggatcgtcggcatcgtgcccgagtcaaccgcgctggcaaagattcccaacatcttcctgaccaccgaaggcctacagcagttggcatacaacggacagccgacaatcagttcgatcgggatcgacgggatgccccgacagctcccggacggctatcagaccgtcaatcgagcggatgctgtcagcgatctgatgcgcccgttgaaggtcgcggtggatgcgatcacggttgtggcggtcttgctgtggatcgttgcggcgttgatcgtcggctcggtggtctacctctctgcgttggagcggctgcgtgactttgcggtgttcaaggcgatcggcgtgccgacgcgctcgattctggccgggctggcgctgcaggcggtcgtcgtcgcgctgctcgcggcggtggttggcggcatcctttcgctgctgttggcgccgttgttcccgatgactgtcgtggtacccctgagtgccttcgtggcgctaccggcgatcgcgactgtgatcggtctgctggccagcgtcgcaggactgcggcgcgtggtggcgatcgatccggcactagcgttcggaggtccctag

SEQ ID NO: 365 - DNA, 1068 bp, Mycobacterium Tuberculosis
atgagcgcttcgctgctagtcaggacggcctgcggcggccgtgcggtcgcccaacggttgcgcaccgtgctgtggccgatcacccagacatcggtcgtcgccggcctcgcgtggtatctcacccatgacgtgttcaaccatccgcaggcgttcttcgcgccgatttcggctgtggtgtgcatgtcggcgaccaacgtgctgcgcgcacgacgtgcccaacagatgatcgtcggggtggcgctggggatcgtgctgggtgctggcgtgcatgctctgcttggttccggaccgatcgccatgggtgtggtggtgttcatcgcgttgtcggtcgcggtgctgtgcgcacgcgggttggtcgcgcaaggcttaatgttcatcaaccaggccgccgtctccgcggtgctggtcttggtcttcgcgtccaacggcagtgtggttttcgaacgcctcttcgacgcgctggtcggtggtgggctggctatcgtgttcagcattctgctcttcccgcccgacccggtggtcatgctgtgcagtgcgcgcgccgacgtgttggccgctgtgcgcgacatcctcgccgagctggtgaacacggtgagcgatcccaccagcgccccgcccgactggccgatggcagccgctgatcgactgcatcagcagctgaacgggctcatcgaggtgcgcgccaacgctgccatggtggcgcggcgagcgccccgccgatggggggtgcgcagcactgtccgcgatctcgatcaacaggccgtctacctggccctgctggtcagttcggtgttgcatctggctcgcaccattgccgggcctggtggcgataagctgccaacgcccgtgcacgccgtgctcaccgacctcgccgcgggaaccggcctggccgacgcggatccgacggcagcgaacgagcacgcggccgccgcccgcgcaaccgcgtcgacactgcaatcggctgcttgtggcagcaacgaagtggtgcgcgccgatatcgtccaagcgtgtgtcaccgatctacaacgggtaatcgaacgcccgggcccgtcgggcatgtcagcctga

SEQ ID NO: 366 - DNA, 903 bp, Mycobacterium Tuberculosis
atgacagcattcggcgtcgagccctacgggcagccgaagtacctagaaatcgccgggaagcgcatggcgtatatcgacgaaggcaagggtgacgccatcgtctttcagcacggcaaccccacgtcgtcttacttgtggcgcaacatcatgccgcacttggaagggctgggccggctggtggcctgcgatctgatcgggatgggcgcgtcggacaagctcagcccatcgggacccgaccgctatagctatggcgagcaacgagactttttgttcgcgctctgggatgcgctcgacctcggcgaccacgtggtactggtgctgcacgactggggctcggcgctcggcttcgactgggctaaccagcatcgcgaccgagtgcaggggatcgcgttcatggaagcgatcgtcaccccgatgacgtgggcggactggccgccggccgtgcggggtgtgttccagggtttccgatcgcctcaaggcgagccaatggcgttggagcacaacatctttgtcgaacgggtgctgcccggggcgatcctgcgacagctcagcgacgaggaaatgaaccactatcggcggccattcgtgaacggcggcgaggaccgtcgccccacgttgtcgtggccacgaaaccttccaatcgacggtgagcccgccgaggtcgtcgcgttggtcaacgagtaccggagctggctcgaggaaaccgacatgccgaaactgttcatcaacgccgagcccggcgcgatcatcaccggccgcatccgtgactatgtcaggagctggcccaaccagaccgaaatcacagtgcccggcgtgcatttcgttcaggaggacagcccagaggaaatcggtgcggccatagcacagttcgtccggcggctccggtcggcggccggcgtctga

SEQ ID NO: 367 - DNA, 348 bp, Mycobacterium Tuberculosis
atggagagtttcgttttgttcttgccgttcctgctcatcatgggtgggttcatgtacttcgcgtcgcgccgccagcgacgggccatgcaagccaccatcgatctgcacgactcgttgcagcccggggagcgggtacacacgacttctgggctggaagccaccatcgtcgccattgccgacgacaccatcgacctcgagatcgcgcccggggtggtcaccacgtggatgaagttggcgattcgtgaccgaattctgccggacgacgacatcgacgaggagctcaacgaggaccttgacaaggatgttgacgacgtggccggcgagcgccgggtgaccaacgattcctga

SEQ ID NO: 368 - DNA, 3507 bp, Mycobacterium Tuberculosis
atgtcgatcaacgatcagcgactgacacgccgcgtcgaggacctatacgccagcgacgcccagttcgccgccgccagtcccaacgaggcgatcacccaggcgatcgaccagcccggggtcgcgcttccacagctcatccgtatggtcatggagggctacgccgatcggccggcactcggccagcgtgcgctccgcttcgtcaccgaccccgacagcggccgcaccatggtcgagctactgccgcggttcgagaccatcacctaccgcgaactgtgggcccgcgccggcacattggccaccgcgttgagcgctgagcccgcgatccggccgggcgaccgggtttgcgtgctgggcttcaacagcgtcgactacacaaccatcgacatcgcgctgatccggttgggcgccgtgtcggttccactgcagaccagtgcgccggtcaccgggttgcgcccgatcgtcaccgagaccgagccgacgatgatcgccaccagcatcgacaatcttggcgacgccgtcgaagtgctggccggtcacgccccggcccggctggtcgtattcgattaccacggcaaggttgacacccaccgcgaggccgtcgaagccgcccgagctcggttggccggctcggtgaccatcgacacacttgccgaactgatcgaacgcggcagggcgctgccggccacacccattgccgacagcgccgacgacgcgctggcgctgctgatttacacctcgggtagtaccggcgcacccaaaggcgccatgtatcgcgagagccaggtgatgagcttctggcgcaagtcgagtggctggttcgagccgagcggttacccctcgatcacgctgaacttcatgccgatgagccacgtcgggggccgtcaggtgctctacgggacgctttccaacggcggtaccgcctacttcgtcgccaagagcgacctgtcgacgctgttcgaggacctcgccctggtgcggcccacagaattgtgcttcgtgccgcgcatctgggacatggtgttcgcagagttccacagcgaggtcgaccgccgcttggtggacggcgccgatcgagcggcgctggaagcgcaggtgaaggccgagctgcgggagaacgtgctcggcggacggtttgtcatggcgctgaccggttccgcgccgatctccgctgagatgacggcgtgggtcgagtccctgctggccgacgtgcatttggtggagggttacggctccaccgaggccgggatggtcctgaacgacggcatggtgcggcgccccgcggtgatcgactacaagctggtcgacgtgcccgagctgggctacttcggcaccgatcagccctacccccggggcgagctgctggtcaagacgcaaaccatgttccccggctactaccagcgcccggatgtcaccgccgaggtgttcgaccccgacggcttctaccggaccggggacatcatggccaaagtaggccccgaccagttcgtctacctcgaccgccgcaacaacgtgctaaagctctcccagggcgagttcatcgccgtgtcgaagctcgaggcggtgttcggcgacagcccgctggtccgacagatcttcatctacggcaacagtgcccgggcctacccgctggcggtggttgtcccgtccggggacgcgctttctcgccatggcatcgagaatctcaagcccgtgatcagcgagtccctgcaggaggtagcgagggcggccggcctgcaatcctacgagattccacgcgacttcatcatcgaaaccacgccgttcaccctggagaacggcctgctcaccggcatccgcaagctggcacgcccgcagttgaagaagttctatggcgaacgtctcgagcggctctataccgagctggccgatagccaatccaacgagctgcgcgagctgcggcaaagcggtcccgatgcgccggtgcttccgacgctgtgccgtgccgcggctgcgttgctgggctctaccgctgcggatgtgcggccggacgcgcacttcgccgacctgggtggtgactcgctctcggcgctgtcgttggccaacctgctgcacgagatcttcggcgtcgacgtgccggtgggtgtcattgtcagcccggcaagcgacctgcgggccctggccgaccacatcgaagcagcgcgcaccggcgtcaggcgacccagcttcgcctcgatacacggtcgctccgcgacggaagtgcacgccagcgacctcacgctggacaagttcatcgacgctgccaccctggccgcagccccgaacctgccggcaccgagcgcccaagtgcgcaccgtactgctgaccggcgccaccggctttttgggtcgctacctggcgctggaatggctcgaccgcatggacctggtcaacggcaagctgatctgcctggtccgcgccagatccgacgaggaagcacaagcccggctggacgcgacgttcgatagcggcgacccgtatttggtgcggcactaccgcgaattgggcgccggccgcctcgaggtgctcgccggcgacaagggcgaggccgacctgggcctggaccgggtcacctggcagcggctagccgacacggtggacctgatcgtggaccccgcggccctggtcaaccacgtgctgccgtatagccagctgttcggcccaaacgcggcgggcaccgccgagttgcttcggctggcgctgaccggcaagcgcaagccatacatctacacctcgacgatcgccgtgggcgagcagatcccgccggaggcgttcaccgaggacgccgacatccgggccatcagcccgacccgcaggatcgacgacagctacgccaacggctacgcgaacagcaagtgggccggcgaggtgctgctgcgcgaagctcacgagcagtgcggcctgccggtgacggtcttccgctgcgacatgatcctggccgacaccagctataccggtcagctcaacctgccggacatgttcacccggctgatgctgagcctggccgctaccggcatcgcacccggttcgttctatgagctggatgcgcacggcaatcggcaacgcgcccactatgacggcttgccggtcgaattcgtcgcagaagccatttgcacccttgggacacatagcccggaccgttttgtcacctaccacgtgatgaacccctacgacgacggcatcgggctggacgagttcgtcgactggctcaactccccaactagcgggtccggttgcacgatccagcggatcgccgactacggcgagtggctgcagcggttcgagacttcgctgcgtgccttgccggatcgccagcgccacgcctcgctgctgcccttgctgcacaactaccgagagcctgcaaagccgatatgcgggtcaatcgcgcccaccgaccagttccgcgctgccgtccaagaagcgaaaatcggtccggacaaagacattccgcacctcacggcggcgatcatcgcgaagtacatcagcaacctgcgactgctcgggctgctgtga

SEQ ID NO: 369 - DNA, 1035 bp, Mycobacterium Tuberculosis
atgaccgagcggtccgaccgcgacgtttcgcccgcactcaccgtcggagagggcgacatcgacgtcagcctgcggccgcgctcgttacgcgaattcatcggccagccccgggtccgcgaacagctgcagctggtcatcgagggagccaaaaaccgcggcggcacaccggatcacattctgctgtccggtccgccgggcttgggcaagacgtcgttggcgatgatcatcgccgccgagctggggtcctcgctgcgggtgacgtcggggccggcgttggaacgcgccggtgacctggcggcgatgctgtccaacctggtcgagcacgacgtgttgtttatcgacgagatccaccgcatcgcccggcccgccgaggagatgctgtatctggcgatggaagacttccgcgtcgatgtggtggtcggcaaaggtcctggggccacgtcgattccgctggaggtcgcgccgttcaccctggtcggggcgactacccggtcgggcgcgttgaccggcccgctgcgcgaccggttcggcttcaccgcgcacatggatttctacgagcccgccgagctggagcgggtgctggcccgctccgccggaattctgggtatcgagctgggcgccgacgccggcgccgaaatcgcccgccgttctcggggaacgccgcggatcgccaaccggttgttgcgccgggtgcgtgacttcgccgaggtgcgcgccgacggcgtcatcacccgcgacgtcgccaaggccgcactggaggtctacgacgtcgacgagctgggtctggaccggctggaccgagcggtgctctcggcgctgacccgcagcttcggcggtggtccagtgggtgtgtcgacgctggcggtggcggtcggggaggaggccgccacggtcgaggaggtgtgcgaaccatttctggtgcgcgcgggtatggtcgcgcgcaccccgcgcggccgggtggccaccgccctggcctggacgcacctgggcatgacgccaccggtcggagcgagtcaaccggggttgttcgagtag

SEQ ID NO: 370 - DNA, 495 bp, Mycobacterium Tuberculosis
gtgccacttcatcagctcgccatagcgccggtggacgtatcaggggcattgcttggactcgtgctgaacgcacccgcgccgcggccactggccacccaccgactggcccacaccgacggcagcgcactgcagctcggcgtcctcggcgcgtcgcatgtcgtcaccgtcgagggacgcttctgcgaggaagtctcctgcgtggcccgcagccggggcggcgatctgcccgagtccacccacgcacccggctaccacctccaatcccataccgagacgcacgacgaggcggcgtttcggcgactcgcgcgccacctgcgtgaacgctgcacgcgggcaaccgggtggctgggcggtgtgtttcccggtgatgacgccgcgctgaccgcactcgccgccgaacccgatggaaccgggtggcgttggcggacttggcatctgtacccgagcgcgtccggcgggacggtggtccacacgacgagccgatggcgtccatga

SEQ ID NO: 371 - DNA, 756 bp, Mycobacterium Tuberculosis
atgagcggccattccaagtgggccaccaccaagcacaagaaggccgtcgtcgacgcccgccgcggcaagatgttcgcccggctgatcaagaacatcgaggtggcggcgcgtgtcggtggcggtgatccggccggcaaccccacgctctacgacgcgattcagaaggcgaagaagagctcggttcccaacgagaacatcgaacgggcccgcaagcgcggcgccggcgaggaggccggcggcgccgactggcagaccatcatgtacgagggctacgcgcccaacggggtggcggtgctgatcgagtgtctgaccgacaaccgcaatcgcgccgccagcgaggtgcgggtggcgatgacgcgcaatggtggcaccatggccgatccggggtcggtgtcctacctgttctcccgcaaaggcgtggtgaccctggaaaagaacggcttgaccgaagacgatgtgctggcggctgttctggaagccggtgccgaggacgtcaacgacctgggcgacagtttcgaggtcatctccgagcccgcggaactggtcgcggttcgtagcgctttgcaagatgccggcatcgattacgaatcggccgaggccagctttcaaccctcggtcagcgtgcccgtggacctggacggcgcacggaaagtgttcaagctcgtcgacgcgctagaagacagtgacgacgtgcagaacgtgtggaccaacgtcgacgtgtccgacgaggtgctggccgccctcgacgacgagtga

SEQ ID NO: 372 - DNA, 900 bp, Mycobacterium Tuberculosis
atggatcctgcaggtaacccagcgaccggtacggcgcgggtcaagcgcggcatggccgagatgctcaagggcggcgtcatcatggacgttgtcaccccggagcaggcccgcatcgccgagggcgccggtgcggttgcggtaatggcgttggaaagggtgcccgccgatatccgcgcccagggcggggtgtcgcggatgagtgaccccgacatgatcgagggcatcatcgccgcggtcaccatcccggtgatggctaaagtgcgcatcggccactttgtcgaggcgcagatcctgcagacgttgggcgtcgactacatcgacgagtccgaggtgctgacgcccgctgactacgcccaccatatcgacaagtggaacttcacggtgcctttcgtgtgtggggcgaccaatctcggtgaggcgttgaggcgcatcagcgagggagcggccatgatccggtccaagggcgaggccgggaccggagacgtctccaacgcgaccacacacatgcgggccatcggtggtgagatccgccggttgacgtcgatgtcggaggacgaattgtttgtcgcggcaaaagaattgcaagcgccctatgaactcgttgccgaggtagctcgggcgggcaagttgccggtcacactgttcaccgccgggggtatcgccacgcccgccgacgcggcgatgatgatgcagcttggcgccgagggcgtcttcgtgggttccggtattttcaagtccggcgcccctgagcaccgcgccgccgcgatcgtcaaggccaccacgttcttcgacgatcccgatgtgctggccaaggtgtcgcgcgggctgggcgaggcgatggtgggcatcaacgtggacgagatcgctgtcggtcatcggctcgcccagcgcggctggtga

SEQ ID NO: 373 - DNA, 228 bp, Mycobacterium Tuberculosis
gtgggcgatcggtaccgggcaggtgaccgggtgctttacggcggctcgatgagcccaaaggatgttgacgacctggctacccagcaggacgtcgacgacggacagtcgatagagcgtcgctggacggggagcggtcagcgacgctggcggcggtcgccgccgacgggccgctaccgtagcaactcgcaaatccaggtctggatttccggcgccggccggctccgttag

SEQ ID NO: 374 - DNA, 1386 bp, Mycobacterium Tuberculosis
atgtcgtttgtcaacgtggccccacagttagtgtccacagccgcggccgatgcagcgcggatcggctcggcgatcaacaccgccaacaccgcggcggcggcgaccacccaggtgttggccgccgcccaagacgaggtgtcaacggcgatcgccgcgctgttcggcagccacggccagcactatcaagcgatcagcgcgcaggtcgcggcctatcagcaacggttcgtgctggccttaagccaagctggcagcacctacgcggtcgccgaagcggccagcgcaacaccgctgcagaacgtgctcgatgcgatcaacgcacccgttcagtcgctgaccgggcgcccattgatcggcgacggcgcgaacgggatcgacgggaccgggcaagccggcggtaacggcgggtggctgtggggcaacggcggcaacggcgggtcgggggcacccgggcaggccggcggggccggcggtgcggccgggttgatcggcaacggtggggccggcggagctggcggccagggcctaccctttgaggccggcgcgaacggcggagccggcggcgccggtggatggctgttcggcaacggcggggccggcgggaacggcgggatcggtggggccggcaccaacctcgctatcggcgggcatggtgggaacggcggcaacgccgggctgatcggcgccggcgggaccggcggggccgggggcaccggcggcggcgagccctccgcgggggctagcggcggcaacggcgggaacggcgggaacggcggcctactgatcggcaacagcggggacggcggggccgccggaaacggggcaggcatttctcagaacggtccagcgtccggattcgggggtaacggtggtcacgccggaaccaccggactgatcggcaacggcggcaatggcggagccggcggagccggtggtgatgtgtccgccgatttcgggggcgttgggtttggcgggcaaggcggtaacggcggcgccggcgggctactctacggtaacggcggggccggcggaaacggcggtgccgccgggtcgcccgggtctgttacggccttcggagggaatggcggtagcggcggcagcggtggaaacggcggcaatgccctcatcggcaacgcgggggccggtgggagcgccggggccggcgggaacggagcgagcgccggcactgctggcgggtccggcggtgacggcgggaaaggcgggaacggcggcagcgtcggactgatcggcaacggtggaaacggcggaaacggcggcgccgggagcctcttcaatggcgctccaggcttcggcgggcccggcggcagcggcggtgcatcactgttggggccacccggcctggccggcaccaacggagccgacggctaa

SEQ ID NO: 375 - DNA, 678 bp, Mycobacterium Tuberculosis
gtggatccggtgcgtcgccagctctaccaattcgtgtgctcacaatcgatgccggtgagccgagaccaggcggccgacgccgtcggcatcccgcgccaccaggcgaaattccatttggaccggctcactgccgaaggcctgctggataccgagtacgcgcgcctgaccggccggtccggccccggcgccgggcggaccgccaagctgtatcgccgggccggccgcgacatcgccctcagccttccacagcgggagtacgagcttgctgggcggctgatggccgcagccatcgtgctgtcggccaccaccggggagccgaccgtggaagtgctcaaccggatcgcccatgactacggccaagccatgggcgccgccgccaccacccggccgcccgcagaccccgcggcggcgctggagctgacgctggatgtgctgcgcaagtacggttatgaaccccgccgcccggctggccctggcgacgatgaggtcgagctggtgaactgcccgttccacgcactggcccgggagcagaccgagctggcctgcaatatgaaccacgccttgatcacaggcgtggccgacgcgctggcaccgcacagcccggccgttcggttggcacccggaccggcccggtgttgtgtagtactcaagcgatgttcggctcacgaccccgagtga

SEQ ID NO: 376 - DNA, 894 bp, Mycobacterium Tuberculosis
atgtcatcgggcaattcatctctgggaattatcgtcgggatcgacgattcaccggccgcacaggttgcggtgcggtgggcagctcgggatgcggagttgcgaaaaatccctctgacgctcgtgcacgcggtgtcgccggaagtagccacctggctggaggtgccactgccgccgggcgtgctgcgatggcagcaggatcacgggcgccacctgatcgacgacgcactcaaggtggttgaacaggcttcgctgcgcgctggtccccccacggtccacagtgaaatcgttccggcggcagccgttcccacattggtcgacatgtccaaagacgcagtgctgatggtcgtgggttgtctcggaagtgggcggtggccgggccggctgctcggttcggtcagttccggcctgctccgccacgcgcactgtccggtcgtgatcatccacgacgaagattcggtgatgccgcatccccagcaagcgccggtgctagttggcgttgacggctcgtcggcctccgagctggcgaccgcaatcgcattcgacgaagcgtcgcggcgaaacgtggacctggtggcgctgcacgcatggagcgacgtcgatgtgtcggagtggcccggaatcgattggccggcaactcagtcgatggccgagcaggtgctggccgagcggttggcgggttggcaggagcggtatcccaacgtagccataacccgcgtggtggtgcgcgatcagccggcccgccagctcgtccaacgctccgaggaagcccagctggtcgtggtcggcagccggggccgcggcggctacgccggaatgctggtggggtcggtaggcgaaaccgttgctcagctggcgcggacgccggtcatcgtggcacgcgagtcgctgacttag

SEQ ID NO: 377 - DNA, 1299 bp, Mycobacterium Tuberculosis
atgcaagtggtcaacgtggctacgctgccggggattgtccgggcctcgtatgcgatgcccgatgtgcactggggatatggtttcccaatcggcggcgtggccgcaaccgacgtcgacaatgatggagtcgtttccccaggcggtgtcggcttcgatatttcgtgcggcgtaagactcttggtcggcgaagggctggaccgcgaggagctgcaaccacggttgccggcggtcatggaccggcttgatcgcgcgataccgcgcggagtgggcacggcgggtgtgtggcgactacccgaccggaacacgctgcaggaggtgctcaccggtggtgcccggtttgcggtggaacaggggcatggcgtcgcgctagacctcgagcggtgcgaagacggcggtgtgatgacaggagcggacgcggccaaaatcagtgaccgggccctccaacgcgggcttgggcagatcggcagccttggctcgggcaaccacttcctggaagtccaggccgtggaccgcgtctacgatccggttgcggccgcgccgatgggtctggcggaagggaccgtctgcgtgatgatccacaccggctcacggggcctgggccatcagatctgcacggatcacgtccgccagatggaacaagccatgggccgatacggaatcgcggtgcccgatcgccaattggcttgtgtgccggtgcactcccccgatgggcaggcctatctcgccgcgatggcggcggcggccaactacggacgcgccaaccgccaactgctgaccgaggcgacgcgtcgtgtgttcgctgatgcaaccggaacacctctggacctgctctacgacgtgtcgcacaacctggccaagatcgagacgcatccgatcgacggtcagctgcgctcggtgtgcgtgcaccgcaagggcgccacccgctcgctgccgccgcaccatcacgagctgccggccgaactggcagcggtcggccaacccgtgctgatacccgggacgatgggtacggcgtcatatgtgcttgccggggtcaccggcaacccggcgttcttttccaccgcgcatggtgctgggcgggtactgagccgtcaccaggccgcccgccacaccagcggtgaagcgatacgcgccagcctcgcaaaacgtggcatcatcgtccgcggtacctctcgtaggggtatcgccgaggaaaagccggaggcctacaaagacgtcgacgaggtcatcgaagccagccatcagagtggcctcgcgcgcaaagtggctcgccttgttcccttgggctgtgtcaaaggatga

SEQ ID NO: 378 - DNA, 432 bp, Mycobacterium Tuberculosis
atgaccaccacgccccgacaacccctgttctgcgcccacgccgacaccaacggcgacccgggccgctgcgcctgcggccagcagctcgccgacgtcggcccggccaccccgccaccgccctggtgcgaaccgggcaccgaacccatctgggagcagctcaccgaacgatacggcggcgtcacaatctgccagtggacacgatattttccggccggcgacccggtggctgccgacgtgtggatcgccgccgacgatcgtgtcgttgacggccgggtgctgcgcacccaaccggcgattcactacacggaaccgcccgtgttggggatcggcccggcggcggcccgccggctggccgctgagctgctcaacgccgccgacaccctcgacgacggccgccggcagctagacgacctcggcgaacaccggcggtga

SEQ ID NO: 379 - DNA, 1128 bp, Mycobacterium Tuberculosis
gtgacgcaaaccggcaagcgtcagagacgcaaattcggtcgcatccgacagttcaactccggccgctggcaagccagctacaccggccccgacggccgcgtgtacatcgcccccaaaaccttcaacgccaagatcgacgccgaagcatggctcaccgaccgccgccgcgaaatcgaccgacaactatggtccccggcatcgggtcaggaagaccgccccggagccccattcggtgagtacgccgaaggatggctgaagcagcgtggaatcaaggaccgcacccgcgcccactatcgcaaactgctggacaaccacatcctggccaccttcgctgacaccgacctacgcgacatcaccccggccgccgtgcgccgctggtacgccaccaccgccgtgggcacaccgaccatgcgggcacactcctacagcttgctgcgcgcaatcatgcagaccgccttggccgacgacctgatcgactccaacccctgccgcatctcaggcgcgtccaccgcccgccgcgtccacaagatcaggcccgccaccctcgacgagctggaaaccatcaccaaagccatgcccgacccctaccaggcgttcgtgctgatggcggcatggctggccatgcgctacggcgagctgaccgaattacgccgcaaagacatcgacctgcacggcgaggttgcgcgggtgcggcgggctgtcgttcgggtgggcgaaggcttcaaggtgacgacaccgaaaagcgatgcgggagtgcgcgacataagtatcccgccacatctgatacccgccatcgaagaccaccttcacaaacacgtcaaccccggccgggagtccctgctgttcccatcggtcaacgaccccaaccgtcacctagcaccctcggcgctgtaccgcatgttctacaaggcccgaaaagccgccggccgaccagacttacgggtgcacgaccttcgacactccggcgccgtgttggctgcatccaccggcgccacactggccgaactgatgcagcggctaggacacagcacagccggcgccgcactccgctaccagcacgccgccaagggccgggaccgcgaaatcgccgcactgttaagcaaactggccgagaaccaggagatgtga

SEQ ID NO: 380 - DNA, 1587 bp, Mycobacterium Tuberculosis
atggctactgtggtcggcatgagtcggcccatgacgtcaaccgcgatgttggtcgcgctgacctgctcggcgacagtgctggccgcatgcgtcccggcgttcggcgccgacccgcggttcgcgacctactcgggcgcaggaccgcaaggcgcagccaccacgacaccaccgccggctggcccaccaccgctcgccgcacccaagaacgacttgtcgtggcacgactgcacgtcacgggtgtactcgaatgctgggatcccagcagcgcccggcgtcaagctggaatgcgcaagctatgacaccgacctcgacccgctcgtcggcgggtccacagcggtaagcatcggcgtagtgcgcgcgcgctccaaccagaccccgagcgacgcaggacccctggtgttcaccaccggctccgacctaccctcgtcgacgcagttgccggtctggctggcacacgcgggcatcgatgtgctccgcagccaccccattgtcgccgtcgaccgccgcggcatgggcatgtcgagcccaatcgactgccgcgatcactttgaccgcgacgagatgcgtgatcaggcgcaattccaggctggcgacgatccggtggccaacctttccgacatctccaacaccgccaccaccgactgcaccgacgccatcgcgccaggcgagtccgcctacgacaacacccacgccgcctcggatatcgagcgcttacgcaaactctgggacgtccctgccctcgccttcgtcggcattggcaacggcacccaagtggcgctggcctacgcagcatcgcgtcccgacaacgtcgccagactgatcctcgactccccaatcgcgttgggggtctctgccgaagccgccgccgagcaacaggtccagggccaacaggcggcgctggacgcattcgctgcgcaatgtgtcgcggtgaactgcgcgctgggctcccatccgaaaggcgcggtcagcgcgctgctgtcggccgcccggtccggtgatgggcccggcggcgcgtcggtggcggctgtcgccaacgccgtcgccaccgcgttgggcttccccgacagtggccgggtcgatagcaccacgaaattggccgacgcgctggccgcggcccgctccggggacatgaacttgctgtccgccctgatcaaccgcgccgataccacccgggatacggacggtcagttcatcagctcgtgcagcgatgcggtcaaccgcccgacaccggaccgggtgcgcgagctggtggtggcttgggggaagctctacccgcagttcggcgccgtcgcggcgctcaacctggtgaaatgcgtgcactggcccagcagttcgccgccgcagccaccgaaagacctcaaggtcgacgtgctgttgctcggtgtgcaaaacgacccgatcgtgggcaacgaaggggtcgccgcgaccgccgccacggccatcaacgccaacgccgccagcaagcgggtgatgtggcaaggtattggccacggcgccagcatctactcgtcctgcgcggtgccgccactcgtcgcctacctggacactggcaagctgcctgacaccgacacctattgccccgcctga

SEQ ID NO: 381 - DNA, 1074 bp, Mycobacterium Tuberculosis
atgagtacccgtcgcgaccttccgcagtcgccgtatctggccgccgtcaccggccgcaagcccagccgggtgccggtgtggttcatgcggcaggccgggcgctcgttgcccgaataccgggcgctgcgcgagcggtacagcatgctggcggcctgtttcgaaccggacgtggcctgtgagattaccctgcagccgatacgccgctacgacgtcgacgcggccatcctgttctccgacatcgtggtgccgctacgggcggccggcgtggatttggacatcgtcgccgacgttgggccggtgatcgcggacccggtgcgcaccgccgccgatgtcgccgccatgaaaccacttgatccacaagcgattcaaccggtattggtggcggcttcgttgttggtcgctgagcttggcgacgtgccgctgatcggtttcgccggcgcgccgttcacgctggcctcctacctcgtggagggcggaccgagccgccatcacgcccacgtcaaggcgatgatgttggccgagccggcgagctggcacgcgctgatggccaagctgaccgacctcaccatcgcgtttctggtcggccaaatcgacgcgggggtggacgccatccaggtattcgactcctgggccggggcgctctcgccgatcgactaccgccagtacgtgttgccgcacagcgcccgggtgttcgctgcgctgggcgagcatggcgtgccgatgacgcacttcggggttgggaccgccgaattgctgggcgcgatgtcggaggccgtgacagccggggagcggccaggccgaggggccgtcgtcggcgtggactggcggaccccgctgaccgacgccgccgcccgggtggtgcccggcacggcgttacagggcaacctcgatccggcggtggtcctggcgggctggccggcggtggaacgtgccgcacgtgccgttgtcgacgacggacgccgcgccgtcgacgccggtgcggccggccatatcttcaacctcggccacggggtgctgccagaaagcgatcccgcggtgctggccgacctggtctcgctcgtacactcgctatga

SEQ ID NO: 382 - DNA, 249 bp, Mycobacterium Tuberculosis
atgtcaggtatgcagacccagacgattgaacgtaccgacgccgacgaacgcgtcgacgacgggaccggcagcgacacaccgaaatacttccactacgtcaagaaagacaagatcgctgagagcgcggtcatgggtagccacgtggtggcgttgtgtggcgaggtgtttcccgttacccgcgcgcccaagccgggctcgccggtctgtcccgattgcaagcggatttacgacaccctcaagaagggctga

SEQ ID NO: 383 - DNA, 693 bp, Mycobacterium Tuberculosis
atgaacgagttggttgataccaccgagatgtacctgcggaccatctacgacctcgaggaagagggcgtgacgccactgcgtgcccggatcgccgagcggctcgaccagagcgggccgacggtcagccagaccgtgtcccggatggagcgcgatgggctacttcgggtggctggcgatcgccacctggagctcaccgaaaagggccgcgcgctggccatcgccgtgatgcgcaagcaccgcctcgccgaacggctcctcgtcgatgtcatcgggttgccgtgggaagaagttcacgccgaggcatgccggtgggagcacgtgatgagcgaggacgtcgagcgacggctggtcaaggtgctcaacaacccgaccacgtccccgttcggcaacccgatcccgggcctggtggaacttggcgtgggcccggaaccgggcgccgacgacgccaacctggtccggttgaccgagttgccggccggctcgccggtcgcagtcgtcgtccgccagcttaccgagcacgttcagggcgacatcgacctgatcacgcggctaaaagacgccggcgtggtgcccaacgcacgagtaaccgtcgaaaccaccccaggcggcggcgtgaccatcgtcatcccgggccatgagaacgtcaccctgccacacgagatggcccacgcggtcaaggtcgagaaagtctga

SEQ ID NO: 384 - DNA, 654 bp, Mycobacterium Tuberculosis
gtgctgtccgcagattcggcgctgaccgagcggcaacgcactattctcgacgtcatccgcgcgtcggtcactagccgcggatatccgccgagcatccgggaaatcggcgacgccgttggtctgacgtcgacgtcttcggtggcgcaccagctgcgcaccctggagcgcaagggctacctacgccgtgacccgaaccgcccccgcgccgtcaatgtgcgcggtgccgacgacgccgccctaccgccggtgaccgaagtggccggctcggacgccttaccggaacccacctttgtccctgtcctgggacgtatcgcggccggcggcccgatccttgccgaggaagccgttgaagacgtcttcccgctgccgcgtgagctggttggcgagggcaccctgttcctgctcaaggtgatcggtgactcgatggtcgaagccgcgatctgcgacggtgactgggtggtggtgcgacagcagaacgtcgccgacaacggcgacatcgttgcggccatgatcgacggtgaggccaccgtcaagacgttcaaacgcgccggcggtcaggtgtggttgatgccgcacaacccggccttcgatcccatcccgggcaacgacgcgacggtgctgggcaaggtcgtcacggtgatccgcaaggtctga

SEQ ID NO: 385 - DNA, 696 bp, Mycobacterium Tuberculosis
gtgttgagcgccatcgggatcgttccgtccgcgccggtgttggttcccgaactggccggagccgccgctgccgagctggccgatttgggggccgcggtgatcgcggcggcctccttgttgccgaaaagctggattgctgtcggaaccgggcgcgccgacgacgtcgtgcgccccaccgacgtcggcacctttgcgggcttcggcgccgacgtgcgagtcgggctcgcgccgcaggacggtgacggagttgccgttccggtggaattacccctgtgtgcgctacttaccgcctgggtacggggccaggcccggcctgaggccagggcacaggtccacgtctatgccagcgaccacggttccgatgccgcggtggcacgtggcaggcaactgcgagccgacatcgaccgggagcccgatccgatcggggtactagtcgtcgccgacggcctgaacaccctgacgccccgcgctcccggcggctatgaccccgacggcgccggtatgcagcgggctctcgacgacgcgttggccagcggcgacctcgccgtcttgacccggctgcccgcacaggtgcttgggcgggtggcatttcaggtgctggccggcctggccgagccaggaccgcgatcggccaaggagttctaccgaggagcgccacacggcgtggggtatttcgccggtgtctggcagccgtga

SEQ ID NO: 386 - DNA, 906 bp, Mycobacterium Tuberculosis
atggccagcgtcgaattcgcgaccattctggcgctgggcgccgcgttgctggccgggatcgggtatgtgacacttcagcggtccgcgcgacaggtcaccgctgaagaatatgtcggccatttcacgttgttccacctctctttgcgtcacgctctgtggtggctgggcagcctggccgcagtcgccagtttcaccctgcaggccattgcgctgacgatgggttcggtggtgttggtgcagtcgctgcaggccaccgcactgttgttcgcgctgctgatcgatgctcggttgactcatcaccgctgtactcccagggagtggatgtgggcggtattgctggccggcgcggtggccgtcatcgtcatgtcgggcaacccggcggccggcactactcgggcccccttctcgacctgggcggtggttgctgtcgtggttgttccggcggtggtgctttgtgtggttggtgcacggattgcctcgggttcgctgtccgcggtgctgctggcggtggcgtcgtcggcaacgttggcggtattcaccgtgctgaccaaaggggtcgtgacggagctcggcgaggggttcgcgacactgatccggacccccgcgttgtatgcctggatcctggttctaccgatcgggctgatgcttcagcagtcgtcgttgcgggtgggcgcgctaaccgcctcgttgccgacgatcaccgtggcgaggccggtgatcgcttcggtgctggggatcaccgtgctcgatgaggtgctgcacaccggccgggtggccctggtcgcgctggtggcagcggtagtggtggtggttgtcgcgaccgtagccttggcccgtgacgaggtcgcgatgatgacggtttccgccggcgaattgggggccgcgggccagcttgcggttcgttga

SEQ ID NO: 387 - DNA, 1353 bp, Mycobacterium Tuberculosis
atgacggccgacgagccccgcagcgacgattcgtccgggtcggccccccaaccggctgccacgccggtgccccgcccgggaccgcgtcccggcccccggccggtgccgcgacccacctcctacccggtgggtgcgcaccctcccagcgacccgcaccgtttcggccgtatcgacgacgacggcacggtgtggctggtcagtgcgagcggcgagcgtatcgtcggctcctggcaggccggcgatcccgaagccgcgtttgcccatttcggcaggcgattcgatgacctgagcaccgaaatcatgctgatggacgagcggttggcgtccggcaccggcgacgcacgcaagatcaaagcccatgcgatcgcgctggccgaaacgttgccgacggcatgcgtgctgggcgatgtcgacgcgctggcagaccggttgacaagcattcgtgatcgcgcggaggtcatcgctgccgccgaccgctccagacgcgaggaacatcgagccgcccagaccgcccgtaaagaggcgctggccgccgaagccgaggagctggccgccaacgcgacacaatggaaggtcgccggtgaccggctgcgggcaatcctcgatgaatggaagacgattagcggtgtggaccgcaaggtcgatgacgcgctgtggaagcgctactcgacggcccgcgatacgttcaaccggcggcgagggtcccacttcgccgaattggaccgtgagcgatccggcgtccggcaaagcaaggaacggctttgtgaacgggccgaggagttgtccgagtcgacggactggaccgccaccagcgcggagttccgcaagctgctcgccgactggaaagcggcgggacgcgcgagcaaggatgtggacgacgccctgtggcgtcgcttcaaggccgcgcaggactccttcttcacggctcgcaatgccgccaccgccgagaaggaggccgagttgcgagccaatgccgacgccaaggaggcgctgctggccgaagcggagcggctcgacacgacaaaccacgaggccgctcgagcagcgctgcggtcgatcgccgagaagtgggacgcgatcggcaaggtgtcgcgggagcgggccgcggagctggagcggcgactacgcgcggtcgagaaaaaggtgcgagaagccggcgaagcggattggtccgacccgcaggcgcgggcccgcgccgagcagttccgcgcccgggccgagcagtttgaacaccaggccgagaaggcagcagcggccggtcgcaccaaggaagccgacgaggcgaaggcgaacgccgaacaatggcggcagtgggccgaggcagccgccgacgcgttgacccgacgcccctaa

SEQ ID NO: 388 - DNA, 207 bp, Mycobacterium Tuberculosis
atgttggctggcgtgcggctgacggagttccacgagcgggtagccctgcatttcggggcggcttatggctcgtcggtgctgctcgatcacgtgctgaccggcttcgacggccgtagcgccgcccaggccatcgaggacggtgtcgagccccgcgacgtctggcgggcattgtgcgccgacttcgacgttccccacgatcggtggtga

SEQ ID NO: 389 - DNA, 813 bp, Mycobacterium Tuberculosis
atggcagtgaaagcgggtcagcgccggccgtggcgttcgttgctgcagcgcggcgtggataccgccggtgatttggccgacctggtagcacaaaagatcagcgtcgccatcgatccgcgtgcccggctgctgcgccgccgccgccgtgcattgcgctggggtctggtattcaccgcaggctgtctgctctgggggttggtgacggcgctgttggcggcctggggctggtttacgtcgctgctggtgattaccggcacgattgcggtcacgcaggccattccggcgacgctattgctgcttcgctaccgctggctgcgctcggagccactgccggtgcggcggcccgcaagtgtgcgccggctgccaccaccgggctcggccgcgcgacccgcgatgtcggcgctgggcgcctccgaacgcgggttcttctcgctgttgggtgtcatggagcggggcgccatgttgccggcggacgagatccgcgacctaacggccgcggccaaccagacttcggcggcgatggtggcgaccgcggccgaggtggtctcgatggagcgggccgtgcaatgctcggcggcgtcgcggtcgtatctggtgccgaccatcaacgcgtttaccgcgcagctgagcaccggcgtccgtcagtacaacgaaatggtcaccgccgcagcgcaattggtttcctcggcgaacggcgcgggtggggctgggcccggacaacagcgctaccgcgaggagttggccggcgccaccgatcgcctggtcgcttgggcgcaggcgtttgacgagctcggcggattgccccggcgttag

SEQ ID NO: 390 - DNA, 813 bp, Mycobacterium Tuberculosis
atggccaatccgttcgttaaagcctggaagtacctcatggcgctgttcagctcgaagatcgacgagcatgccgaccccaaggtgcagattcaacaggccattgaggaagcacagcgcacccaccaagcgctgactcaacaggcggcgcaagtgatcggtaaccagcgtcaattggagatgcgactcaaccgacagctggcggacatcgaaaagcttcaggtcaatgtgcgccaagccctgacgctggccgaccaggccaccgccgccggagacgctgccaaggccaccgaatacaacaacgccgccgaggcgttcgcagcccagctggtgaccgccgagcagagcgtcgaagacctcaagacgctgcatgaccaggcgcttagcgccgcagctcaggccaagaaggccgtcgaacgaaatgcgatggtgctgcagcagaagatcgccgagcgaaccaagctgctcagccagctcgagcaggcgaagatgcaggagcaggtcagcgcatcgttgcggtcgatgagtgagctcgccgcgccaggcaacacgccgagcctcgacgaggtgcgcgacaagatcgagcgtcgctacgccaacgcgatcggttcggctgaacttgccgagagttcggtgcagggccggatgctcgaggtggagcaggccgggatccagatggccggtcattcacggttggaacagatccgcgcatcgatgcgcggtgaagcgttgccggccggcgggaccacggctacccccagaccggccaccgagacttctggcggggctattgccgagcagccctacggtcagtag

SEQ ID NO: 391 - DNA, 630 bp, Mycobacterium Tuberculosis
atgagcaggtcaacccgttattctgttgccgtgtcggcgcagcctgaaacgggtcagatagcaggccgcgcccgcattgccaacctcgccaatatcctgacgctgttgcggctggtgatggtcccggtcttcctgctggccttgttctatggcggcggccaccactccgcggcccgcgtagtggcgtgggcgatatttgcaaccgcctgcattaccgatcgattcgacggcctgctggctcgcaattacgggatggcaaccgaattcggtgcgtttgtcgatccgatcgcggacaagactctgatcggctcggcgctgatcggattgtcgatgctcggcgacttgccgtggtgggtcacggtgctaatcctgacccgcgaactcggagtgaccgttttgaggttggcggttattaggcgcggtgtcattcccgcgagctggggcggcaagctgaagacctttgtccaggcggtggcaattggcttattcgtgttgccactttcgggtccgctgcacgttgcggcggtggtagtgatggccgccgcgatcctgctcaccgtgatcactggtgtcgattacgtggccagggctctgcgggacatcggggggatccgccagaccgccagctga

SEQ ID NO: 392 - DNA, 315 bp, Mycobacterium Tuberculosis
atgcccgtcgtcgtcgtcgccacgctgaccgccaagcctgaatcggtcgacaccgtccgcgacatcctcacccgcgcggtcgatgacgtgcaccgcgaacccggctgccagttgtacgcgctccacgaaaccggcgagaccttcatcttcgttgagcaatgggccgatgccgaggcgctcaaggcccatagcggcgcccccgcggttgccaccatgtttaccgcggccggcgagcacctggtcggggcgccggacatcaaactgctgcagccggttcccgccggcgacccgagcaaagggcagctgcgccggtga

SEQ ID NO: 393 - DNA, 903 bp, Mycobacterium Tuberculosis
gtgaccaccgtcggattcgacgtcgcagcgcgcctaggaaccctgctgaccgcgatggtgacaccgtttagcggcgatggctccctggacaccgccaccgcggcgcggctggccaaccacctggtcgatcaggggtgcgacggtctggtggtctcgggcaccaccggcgagtcgccgaccaccaccgacggggagaaaatcgagctgctgcgggccgtcttggaagcggtgggggaccgggcccgtgttatcgccggtgccggcacctatgacaccgcgcacagcatccggctggccaaggcttgtgcggccgagggtgcgcacgggctgctggtggtcacgccctactattccaagccgccgcagcgggggctgcaagcccatttcaccgccgtcgccgacgcgaccgagctgccgatgctgctctatgacatcccggggcggtcggcggtgccgatcgagcccgacacgatccgcgcgttggcgtcgcatccgaacatcgtcggagtcaaggacgccaaagccgacctgcacagcggcgcccaaatcatggccgacaccggactggcctactattccggcgacgacgcgctcaacctgccctggctggccatgggcgccacgggcttcatcagcgtgattgcccacctggcagccgggcagcttcgagagttgttgtccgccttcggttctggggatatcgccaccgcccgcaagatcaacattgcggtcgccccgctgtgcaacgcgatgagccgcctgggtggggtgacgttgtccaaggcgggcttgcggctgcagggcatcgacgtcggtgatccccggctgccccaggtggccgcgacaccggagcagatcgacgcgttggccgccgacatgcgcgcggcctcggtgcttcggtga

SEQ ID NO: 394 - DNA, 1317 bp, Mycobacterium Tuberculosis
atgccgcgacggtcaccagctgaccccgcggcggcgctggcgccgcggcgcaccaccctgccgggcgggctgcgagtggtcaccgaattcctgcccgcggtgcactccgcgtcggtcggggtgtgggtcggcgtcggatcgcgcgacgaaggcgccacggtggccggggcggcgcacttccttgagcatttgctgttcaagtcgacgcccacccgctctgccgtggacattgcgcaggcgatggacgcggtgggcggggaactgaacgcattcaccgccaaggagcacacctgctactacgcccacgtgctcggcagcgacttgccgttggccgtcgacctggtcgccgatgtggtgctcaacggccgctgtgccgccgacgatgtcgaggtggaacgtgacgtcgtcctcgaggagatcgcgatgcgcgacgacgaccccgaggacgccttggcggacatgttcctggcggcgttgttcggcgaccacccggtcggtcgcccggtgatcggcagcgcgcaatccgtgtcggtgatgacgcgggctcaactgcaatcgtttcacctgcggcgctataccccggagcggatggtcgtcgcggccgccggcaatgtggatcacgacgggctggttgcgttggtccgcgagcacttcgggtcccggttggtccgggggagacggccagttgcgccgcgcaagggtaccggccgggtcaacggcagcccccggttgacactggttagccgcgacgccgaacagacgcatgtgtcgctgggcatccgcacacccgggcgcggctgggagcatcgttgggcactgtcggtgctgcacaccgcgctgggcggtggcttgagttcccggctgttccaggaggtccgcgagacccgcgggctggcctactcggtctactccgcgctggatctcttcgccgacagcggcgcgctttcggtgtacgcggcctgcctgcccgaacgcttcgccgacgtgatgcgggtgaccgccgatgtgctggaaagcgtggcacgcgacggcatcaccgaggcggaatgcggcatcgccaagggatcgctgcggggtgggctggtgctagggctggaggattccagctcccggatgagccggctcggccgcagcgagttgaactacggcaagcaccgcagcatcgaacacaccttgcggcaaatcgagcaggtcaccgtggaggaggtcaacgcggtggcccgccacctgctgagcaggcgctacggtgctgccgttcttggcccacacggatcgaaacgatcactgccgcaacaacttcgagcgatggtagggtag

SEQ ID NO: 395 - DNA, 582 bp, Mycobacterium Tuberculosis
atgaatctggcggtgtgggctgagcgcaacggtgttgcgcgggtgactgcgtatcgctggtttcatgcggggttgttgccggtgccggcgcggaaggccgggcggctgattctcgtggacgaccagccggccgatagatcccgccgggcgcggacggccgtgtatgcgcgagtgtcgtcagcggatcagaagccggacctggatcggcaggtggcgcgggtgaccgcctgggccacgaccgagcagatcgcggtcgacaaggtcgtgaccgaggtcggttcggcgctgaacgggcaccgccgaaagtttcttgcgctgctgcgtgacccatcggtgaagcggatcgtggtggaacaccgagaccggttctgccggttcggctctgagtacgtcgaagcggcgctggccgcccaaggccgcgagctggtcgtggtcgactcggccgaggttgatgacgacctggtacgggacatgaccgagatcttgacctcgatgtgcgcccggctgtacggcaagcgcgctgcgcagaaccgggccaagcgcgcattggcggccgccgccgaagagtcggaggctgcctga

SEQ ID NO: 396 - DNA, 1044 bp, Mycobacterium Tuberculosis
atggcacgtcaacctctggagcagcgggtggcccgggcggcgcaggcggcgctggcccgacagcggttcgtcagcgcgatcgatgtgctgctcggcctgggctggctggcgccctcgcatgtcgaccagtggcggcagggccgcgtcgactcgctggagcaagtcgtacaggccaacctcagcaagatcaccgccgtgatggccgcgttgcggcgctgggcccgcgaccgggggctcaacccgtcggagaccgattacgtcgctcgcactcgggaccgccgtcggctgcggttcagcgtcaccggcgaggacgccatcgagcgcgcgtatcgcacgcattgggtgtcgccggagctctcggagcgtgcggtcgcgcggcagagccggcgccccgatttggtcgtgatcatgccggtcaacgactggtcatgcgcgtcgtgtggcggcagcggtgacctgatgttccttgaggacgcggggccgttgtgcctggactgcgcggaccttggccatctggtcttcttgccgtccggggacgccgcgcttacccgccgggccaagcgggcgagccggctttcggcggtggtggtgcggtggagccgggcgcgtaagcgatacgagcgtcagggcatcctggtcgaggcggaggcgctggagcgcgccgaaaacgagtgcctcgccgatgcggaggtgcgcgcccgccgccgggagcgcgacgaggcgcgacgggccaacgaggacctgcgtctgcaagccgaattcggcgccgcgattcgcacgctgttcccgaactgcccggccggccgggccgaggcgatcgcccgccacgcggccacccgcggcagcggcaggatcggacgtagcgcggccggacgggcgctcgatcccgaagcggtgaggctggccgtcgcggcgtcggtgcggcatatcgacacttcgttcgacgaactgctgatgtcgggtgtcgaccgggaaacggcgcggcaccgggtgggtgagcacgtcgaggaagtgctgcgcgactggcgcgcgaccagccgctga

SEQ ID NO: 397 - DNA, 468 bp, Mycobacterium Tuberculosis
atgacctgcccgagcctagtcggactgcgcaccgaggccgcggaactgagttactccgaccagccggacgcgctcggagtggcgatgcgcgaacgtcgggaacaacagaacctcgttcggccgccacggagaaacgcttctcgccgcatcaacaccgatcagacgtcgacgaagtacgtctacattacgtacatgcccgagactctgactggtcgcctcaacttccgcctgtctcctgaacaggagcaggcccttcgccacgccgccgcgctcaccggccagagcctgtcggggttcgtattgtccgccgcggtcgaccacgcccacgatctcttggcccgggccaaccggatcgagctgtccgaggccgctttccgccgcttcgtcgccgcgctcgacgagcccgacgaggcggctcccgaattggtgcgcctcgccagacggaagagccgcattcccccccattga

SEQ ID NO: 398 - DNA, 375 bp, Mycobacterium Tuberculosis
atgagcgtcatccaagacgactatgtgaaacaggccgaagtaattcgcggcctgccaaagaaaaagaacggcttcgagctgaccacaacccagctgcgggtgctactcagcctgaccgcacagctcttcgacgaggcgcagcagagcgccaaccccacgctcccgcgtcagctgaaggagaaggtccagtacctgcgggtccggttcgtctaccagtccgggcgtgaagacgcggttaagacattcgtccgaaacgcgaaactcctagaagcgctggaagggataggcgatagccgcgacgggctgctgcgattctgccggtacatggaagccctagccgcatacaagaagtacctcgatccgaaggacaagtga

SEQ ID NO: 399 - DNA, 546 bp, Mycobacterium Tuberculosis
gtgacgccagcgctgaaggagtggagcgcggcggtgcacgcgctgctggacggccggcagacggtgctgctgcgtaagggcgggatcggcgagaagcgcttcgaggtggcggcccacgagttcttgttgttcccgacggtcgcgcacagccacgccgagcgggttcgccccgagcaccgcgacctgctgggcccggcggccgccgacagcaccgacgagtgtgtgctactgcgggccgcagcgaaagttgttgccgcactgccggttaaccggccagagggtctggacgccatcgaggatctgcacatctggaccgccgagtcggtgcgcgccgaccggctcgactttcggcccaagcatcggctggccgtgctggtggtctcggcgatcccgctggccgagccggtccggctggcgcgtacgcccgagtacggcggttgcaccagctgggtgcagctgccggtgacgccgacgttggcggcgccggtgcacgacgaggccgcgctggccgaggtcgccgcccgggtccgcgaggccgtgggttga

SEQ ID NO: 400 - DNA, 1044 bp, Mycobacterium Tuberculosis
atgaacatcgacatggctgctctgcatgccatcgaggtggaccggggtatctcggtcaatgaactgctcgaaacgatcaagtccgcgctgttgactgcctaccggcacacccaaggtcaccagaccgatgcgcgcatcgagatcgaccggaaaaccggtgtcgttcgggtgatcgcccgtgagaccgatgaggctggcaatctcatcagcgagtgggacgacactccagagggcttcggccggatcgccgccacgacggcacgccaagtgatgttgcagcgattccgcgacgccgagaacgagcgcacctacggcgagttctccacccgcgagggcgagatcgttgcgggagtgatccagcgcgatagccgggccaacgcccgcggtctggtcgtcgtccggattggcaccgagaccaaggcttccgagggtgtgatcccggccgctgagcaggtaccgggggagagctatgaacatggcaaccggctgcgctgctacgtagttggtgtaacccgaggtgcccgcgagccgctgattacgctgtcgcgcacgcaccccaatctggtgcgcaagctgttctcgctggaagtccccgagatcgccgacggatcggtggagatcgtcgcggtggcccgggaggccggccaccgctccaagatcgctgtgcggtccaacgttgccggcttgaacgccaagggtgcttgcatcggtccgatggggcaacgggtccgcaacgtgatgagcgagctgtccggggagaagatcgacatcatcgactatgacgacgatccggcgcgttttgtcgccaacgcgttgtcgccggccaaggtggtgtcggtgtcggtgatcgaccagaccgcccgggccgcccgcgtggtggtgcccgatttccaattgtcgctggcaatcggaaaggaagggcagaacgcccggctggctgcccggctcaccgggtggcgtatcgatattcgcggcgatgcgccgccgcccccgcccggtcagcccgaacccggagtcagccgcggtatggcgcacgaccgctag

SEQ ID NO: 401 - DNA, 552 bp, Mycobacterium Tuberculosis
gtgaccaccgggctaccttcgcagaggcaggtgatcgagctactcggtgcagatttcgcgtgcgccggctacgagatcgaagacgtggtcatcgatgcgcgggcccgcccgccgcggatagcggtgatcgccgacggtgacgcccctctcgacctggatacgatagccgcattgtcgcgcagggcatcggctttgctggacggcctggacggtgcgaacaagatccggggccgctacctgctcgaggtcagctctcccggtgtggaacgcccgctgaccagcgaaaagcacttccgccgtgctcgaggccgcaaggttgagctggtgttgtcagacggatcgcgactgaccggccgggtcggcgagatgcgtgctggcacggtggcgttggtgatccgggaagaccggggctgggcagtccgtgagatcccgcttgctgagattgtgaaagctgttgtccaggttgagttttcgccaccggctccggcggagttggaactggcccagtcttccgagatggggctggcccgcgggacggaggccggagcatga

SEQ ID NO: 402 - DNA, 546 bp, Mycobacterium Tuberculosis
gtgcttagagcagcaccagtcatcaaccggctcacgaatcgacccatcagcaggcggggtgtgctggccggtggcgccgcgctggccgcactgggagtggtgtccgcctgcggcgagtccgcgcccaaggcacccgcggtcgaagagctgcgctcgccgttggaccaggcccgacacgacggtgcgctcgcagctgccgccgccacagccatcgggatcccgccgcaggttgccgccgcgctgaccgtcgtcgccactcagcgaacctcgcatgctcgagcgctggccaccgagatcgcccgggccgcgggcaagctggtatccgctacgagcgaaaccagcagctccagtcccagcccaaccgatccggcggcaccgccaccagcggtgtccgacgtgatcgattcgctgcgcacgtcagcgggggaagccagtcgactagtggcgacgacatcgggctaccgagcagggttgctcgcctccattgccgcgtcctgcaccgcctcctatacggttgcgctcgtgccttcaggcccgtcgatatga

SEQ ID NO: 403 - DNA, 1218 bp, Mycobacterium Tuberculosis
gtgaccgagaacccctatctggtcgggttacggctggctggcaagaaggtcgtcgtggttggcgggggcacggtcgcccagcgccggttacccctgctgatcgccagtggcgcggacgtgcacgtgatcgcccccagcgtcacccccgccgtcgaggcgatggaccagatcaccttgtcggtgcgtgactaccgcgacggcgaccttgacggcgcctggtatgcgatcgcggccaccgatgacgcgcgggtgaacgtggctgtcgtcgccgaggcggagcgccgacggatcttttgcgtccgggccgatatcgcggtggaggggacggcggtgaccccggcgtcattcagctatgcgggcctgtcggtgggggtgctcgccggtggtgagcaccgccgttcggcggcgatccgctcggcaatccgggaggcgttgcagcagggcgtcatcactgcgcagagttccgacgtcctcagcggcggagtggcgttggtcggcggcggtcccggcgatcccgaactgatcacggttcgcggtcgccggctgcttgcccaggccgatgtcgtggtcgccgaccggctcgccccgcccgaactgctggccgagctgccgccgcacgtagaagtcatcgacgcggccaagatcccttacggccgggccatggcccaggacgcgatcaacgctgtcctgatcgaacgggccagatccggcaactttgtggtccgtctcaaagggggcgaccccttcgtgttcgcccggggctatgaagaagtgctggcatgtgcccacgccggaatcccggtcaccgtggtgccaggtgtgacgagtgccatagccgtgcccgctatggcgggcgttccagtcactcaccgggccatgacccacgaattcgtggtggtcagtggccatcttgcgcccggtcatcccgaatcgttagtgaattgggatgcattggctgcattgacgggcaccatcgttttgctgatggcggtcgaacgcatcgagcttttcgttgacgttctgctaaagggtggccgaactgcggatacgccggtactggtggttcaacacggaacgaccgccgctcaacagacgttgcgggccacccttgccgacacgccggagaaggtccgcgcggcggggatccgacctcccgcgatcatcgtgatcggggctgtagtcggcctgagcggcgttcggggtttaaacaattcttaa

SEQ ID NO: 404 - DNA, 1119 bp, Mycobacterium Tuberculosis
atggccagcagccagctcgacaggcagaggtcgcggtcggccaaaatgaaccgcgctctgacagcagcagaatggtggcgtctgggcctgatgttcgcggtgatcgtcgccttgcatctggttggctggctcaccgtgacgctcttggtggagcccgcgcggctcagcttgggcggcaaggcattcggcatcggcgtcgggctgacggcgtacacgctgggcttacggcacgcgttcgacgccgaccacatcgccgccatcgacaacaccacccgcaagctgatgagcgacggacaccgaccccttgccgtcgggttcttcttttcactgggccactccacggtggtcttcgggctggcggtaatgctggtgaccggactcaaggctatcgtcggaccggtcgagaacgactcctcgacgctgcatcactacacaggcttgatcggtaccagcatttccggcgcgttcctgtatttgatcggcatcctcaacgtcatcgtcctggtcggcatcgtgcgtgtcttcgcccacctgcgccgcggcgactacgacgaagccgaactcgaacagcagttggacaaccgcggactgctcatccggttcctcggccgcttcaccaagtcactcaccaagtcctggcatatgtacccggtcggatttttgttcggtctcgggttcgacaccgccaccgagatcgcgctgttggtgctggcgggaaccagtgccgcggccggcctgccctggtatgccatcctgtgcctgcccgtcttgttcgccgccggcatgtgtctgctggacaccatcgacggttcgttcatgaatttcgcgtacggctgggccttctccagccccgtgcgcaagatctactacaacatcaccgtcaccggactgtcggtggcagtcgcactgttgattggcagcgttgagctgctgggcctgatcgccaaccagttgggttggcagggcccgttctgggactggcttggcggcctcgacctcaacaccgtcggcttcgtcgtcgtcgcgatgttcgcgctcacctgggccattgccctgctggtctggcactacggccgcgttgaagagcggtggaccccggcgcccgaccgcacaacttga

SEQ ID NO: 405 - DNA, 1368 bp, Mycobacterium Tuberculosis
atgagtaccacgcaactgatcaatcccgccaccgaggaagtgctggcctcagttgaccacaccgacgccaacgcggtggacgacgccgtgcaacgcgcgcgagcagcgcagcggcgctgggcacggttggcaccggcgcagcgggcggccggcctgcgcgcattcgcggcagccgtgcaagcccacctcgacgaactggccgcgctcgaggtagccaattccggacatccgatcgtgtcggccgagtgggaagccggccacgtgcgtgacgtgttggcgttctatgccgccagcccggaacggttgtccggcaggcagattcccgttgccggcggggtggacgtcactttcaacgaaccgatgggcgtggtcggtgtgatcacgccatggaatttcccgatggtgatcgcgtcctgggccatcgcgccggcgctggccgccggcaacgcggtgctggtcaaacccgccgaactgacgccgctgaccacgatgcggctcggtgagctggccgtcgaggcgggtctggacgaagacctgctgcaggtgttgccgggaaagggcacggtggtcggggagcggttcgtcacccaccccgacattcgcaagatcgtgttcaccgggtccaccgaagtcggcaagcgggtcatggccggtgccgcggctcaagtcaaacgagtgacgttggaactgggtggcaagagcgccaacatcgtcttccacgactgcgacctggagcgcgccgcgacgaccgcgccggccggggtcttcgacaacgctgggcaggattgctgtgcccgaagtcgaatcctggtgcagcgcagcgtttacgaccggtttatggagctgctcgagccggcggtacacagcattgtcgtcggggaccccggatcacgcgccaccgagatgggtccgctggtatcgcgcgcacaccgtgacaaggtcgccggttatgtgcccgacgacgctccggtggcgtttcggggtacggctccggctgggcgcggattttggtttccaccaaccgttctcacacccaaacgcggcgaccgcaccgtcaccgacgaaatcttcgggccggtggttgtagtgctgacgttcgacgacgaggccgacgctatcagcctggccaacgacaccgcgtacgggctgtccggatcgatctggaccgatgacctgtcccgcgcgctgcgggtggcgcgggcggtcgaatccggcaacctgtcggtaaactcgcactcgtcggtgcgcttcaacaccccgtttggcggtttcaagcagtccggtgtgggccgcgagctagggccggacgctccgctgcagttcaccgaaaccaaaaatgtgttcatcgccgtcggggaggagatgtga

SEQ ID NO: 406 - DNA, 381 bp, Mycobacterium Tuberculosis
atgatcttcgtcgataccaacgtcttcatgtatgcggtcggtcgcgatcacccattgcggatgcccgcccgtgagttcctcgagcacagcctcgaacaccaagaccgccttgtcacgtcagccgaggccatgcaggaattgctgaacgcgtatgtgcccgtcgggcggaactcgacgctggactcagcattgaccttggtgcgggcgctgacggaaatctggcccgtcgaggcggccgacgtcgcgcatgcgcgaaccctgcaccaccgccaccccggtctgggcgcgcgcgatctgctacacctggcatgctgccagcgtcgcggtgtcacgcggatcaagacgttcgaccacacactggccagcgcattccgatcatga

SEQ ID NO: 407 - DNA, 1242 bp, Mycobacterium Tuberculosis
gtgaccaactcgaccgacgggcgcgctgacggccggttgcgggtggtggtgctgggcagtaccggctcgatcggcacccaggcgcttcaggtcatcgccgacaatccggaccgtttcgaggtagtcgggctggccgctggcggcgcccatctggacacgttgctgcgacaacgtgcgcagaccggggtgaccaatattgccgtcgctgacgagcacgcggcgcagcgggtcggcgacatcccctaccacggatccgacgccgccacccggctggtcgagcagaccgaggccgacgtcgtcctcaatgcgctggtcggcgcgttgggcctgcgaccgacgttggccgcgctcaagacgggtgcccggctggcgctggccaacaaggaatcgctggtcgccggtggttcgctggtgctgcgggcggcgcggcccggtcagatcgtgccggtcgactccgaacactccgcgctggcccagtgcctgcgcggcggcactcccgacgaggtcgccaagctggtgctgacggcctcgggagggccgtttcggggctggtccgcggccgacctcgagcatgtcacccccgagcaggctggcgcgcatcctacgtggtcgatgggcccgatgaacacgctgaattcggcgtcgctggtcaacaagggacttgaggtcatcgaaacccacctgctgttcggcatcccctacgaccgcatcgatgtcgtggtgcacccccagtcgatcatccattcgatggtcaccttcatcgacggttcgacgatcgcccaggccagtcccccggacatgaagctaccgatttcgttagcgctgggctggccgcgtcgggtcagcggcgccgctgctgcctgtgatttccataccgcgtcgagctgggagttcgagccgttggacaccgacgtcttccccgcggtcgagttggcccggcaggccggcgtagccggtggctgcatgaccgcggtttacaatgcggcgaacgaagaagcagcagcggcgttccttgctggccggatcggcttcccggccatcgtcggcatcatcgccgacgtgttgcacgctgccgaccaatgggccgtcgaacccgctaccgtggatgacgtactcgacgcgcagcgctgggcccgcgagcgagcgcagcgcgcggtatctggtatggcttcggtggcgatcgcaagcacggcgaagccgggcgcagcgggtcgacacgcatcgacgttagaaaggtcctga

SEQ ID NO: 408 - DNA, 663 bp, Mycobacterium Tuberculosis
atgatcaacgttcaggccaaaccggccgcagcagcgagcctcgcagccatcgcgattgcgttcttagcgggttgttcgagcaccaaacccgtgtcgcaagacaccagcccgaaaccggcgaccagcccggcggcgcccgttaccacggcggcaatggctgaccccgcagcggacctgattggtcgtgggtgcgcgcaatacgcggcgcaaaatcccaccggtcccggatcggtggccggaatggcgcaagacccggtcgctaccgcggcttccaacaacccgatgctcagtaccctgacctcggctctgtcgggcaagctgaacccggatgtgaatctggtcgacaccctcaacggcggcgagtacaccgttttcgcccccaccaacgccgcattcgacaagctgccggcggccactatcgatcaactcaagactgacgccaagctgctcagcagcatcctgacctaccacgtgatagccggccaggcgagtccgagcaggatcgacggcacccatcagaccctgcaaggtgccgacctgacggtgataggcgcccgcgacgacctcatggtcaacaacgccggtttggtatgtggcggagttcacaccgccaacgcgacggtgtacatgatcgatacggtgctgatgcccccggcacagtaa

SEQ ID NO: 409 - DNA, 582 bp, Mycobacterium Tuberculosis
atgaaggtaaagaacacaattgcggcaaccagtttcgcggcggccggcctggcggctctggcggtggctgtctcaccgccggcggccgcaggcgatctggtgggcccgggctgcgcggaatacgcggcagccaatcccactgggccggcctcggtgcagggaatgtcgcaggacccggtcgcggtggcggcctcgaacaatccggagttgacaacgctgacggctgcactgtcgggccagctcaatccgcaagtaaacctggtggacaccctcaacagcggtcagtacacggtgttcgcaccgaccaacgcggcatttagcaagctgccggcatccacgatcgacgagctcaagaccaattcgtcactgctgaccagcatcctgacctaccacgtagtggccggccaaaccagcccggccaacgtcgtcggcacccgtcagaccctccagggcgccagcgtgacggtgaccggtcagggtaacagcctcaaggtcggtaacgccgacgtcgtctgtggtggggtgtctaccgccaacgcgacggtgtacatgattgacagcgtgctaatgcctccggcgtaa

SEQ ID NO: 410 - DNA, 1383 bp, Mycobacterium Tuberculosis
gtgatggcgcgcttaaaggtgcctgaggggtggtgtgtgcaggcgtttcggttcacgctgaacccgacccagacgcaagctgccagcttggcgcgccattttggtgctcgccgtaaggcattcaactggaccgtcacggcgcttaaagccgacatcaaggcgtggcgcgcggatggcaccgagtcggcgaagccgtcgctgcgggtgttgcgcaaacggtggaacacggtcaaagaccaggtgtgtgtcaacgcgcagaccgggcaggtgtggtggccggaatgctcgaaagaggcctatgccgatggcatcgcgggcgcggtcgatgcgtattggaactggcagagctgccgtgccgggaaacgggctggcaaaacagtaggcgttccccggtttaagaagaagggacgcgacgccgatcgcgtgtgcttcacgaccggtgcgatgcgtgtggagcccgaccgccgccacctcaccttgccggtgatcggcaccatccgtacgtacgagaacacccgccgggttgagcggctcatcgccaaaggtcgggcgcgggtgctggcgatcaccgtgcgccgcaacggcacccgcctggatgcgagcgtgcgggtgctcgtccaacgcccccaacagcggcgtgtggcgcttcctgattcacgggtgggtgtcgacgttggtgtgcggcgtttggccactgttgcagacgctgagggcacggtgcttgaacaagtgccgaatcctcgcccgcttgatgctgcgttgcgcgggttgcgccgcgtcagccgcgcacgctcacgctgcacgaaaggctcacgccgctactgtgagcgcaccaccgaactgtcccggctgcaccgtcgggtcaacgatgtccgtacccaccacctgcacgtgctgacaacacgattggccaaaacccacggccgtatcgttgtcgaaggtctggatgcggcgggaatgctgcggcaaaagggactgccgggggcgcgcgccagacggcgcgcactgtctgatgcagccctggcaaccccgcgccgtcacctgtcctacaagacaggctggtacggatcgagtctggtggtcgccgaccgctggttcccatcgtcgaaaacctgccatgcctgccggcatgtgcaagacatcggctgggacgaaaaatggcaatgcgacggctgttcgatcacgcaccaacgtgacgacaacgccgcgatcaacctcgcacgctacgaggaaccacctagcgtcgtcggcccagttggggccgccgtcaagcgtggagccgaccgtaagaccgggcctggcccggcgggtggccgtgaagcgcggaaggcaaccggccacccggccggcgaacaaccccgagacggggtgcaagtcaagtga

SEQ ID NO: 411 - DNA, 489 bp, Mycobacterium Tuberculosis
atggctgtgaagatcaagctcactcggcttggcaagatccgcaatcctcagtaccgcgtcgccgtcgccgatgcgcgcacccgccgcgacggccgagcgatcgaggtaatcggccggtaccaccccaaagaagagccgagtctcatcgagatcaactccgagcgtgcccagtactggctctcggtgggtgctcagcccaccgagcccgtcctcaagctgctgaagatcaccggggattggcagaagtttaagggcctacctggcgctcagggccggttgaaggtcgccgcacccaagcccagcaagctcgaggtgttcaacgccgcgttggccgccgccgacggtggtcctaccaccgaggccaccaaaccgaagaagaagtcgccggccaaaaaggctgccaaggctgctgagccagcgccgcagcctgagcagccggacacgccggcgctgggtggcgagcaggccgagctgacggcggaaagctga

SEQ ID NO: 412 - DNA, 588 bp, Mycobacterium Tuberculosis
atggccaggacccagcagcagcgccgcgaagaaaccgttgcacggcttctgcaggccagcatcgacacgatcatcgaggtcggctacgcgcgggcatcggctgccgtgatcaccaagcgggctggggtgtcggtaggcgccctgttccggcacttcgaaacgatgggtgatttcatggcggccacggcatacgaggtgttgcgccgtcagctggaaacgttcaccaagcaagtcgccgaaataccggccgatcggccggcgcttccggcggcgctgacgattttgcgggacatcacggccggctccacgaatgcggtgctctacgagcttatggtcgccgcgcgcaccgacgagaagctcaaggagacgctgcagaatgtgctggggcagtacagcgcgaagatccacgacgccgcgcgtgctctgccgggtgccgagagctttccggaggagacatttccggtcatcgtggcgttgatgaccaacgtcttcgacggcgccgccattgtgcgaggggtactgccgcagcccgaactcgaggaacagcggattcccatgctgacggcgctgctgaccgccggcctatga

SEQ ID NO: 413 - DNA, 2427 bp, Mycobacterium Tuberculosis
atggaggcagaaagtccttgtgccgcaagcgatttagctgtcgcccgacgcgagctgctgtccggcaaccatcgcgagctggatccggtcgggctgcggcagacgtggctggatctgcatgagtcttggctgatcgacaaggccgacgagatcgggatcgccgatgccagtggttttgcaatcgtcggggtcggcgggctcggccgccgcgagctgctgccgtattcggacctggacgtgttgctgttgcacgatggcaagcctgctgacatcttgcggcccgtcgccgacaggttgtggtatccgttgtgggatgccaacattcggctcgatcacagtgtgcgaacggttagtgaggcattgaccatcgccaattccgatctgatggccgctctaggcatgctggaagcccgccacatcgccggcgatcagcagctctcgttcgcgttgatcgacggcgtgcgacgccagtggcgcaacggaattcgttcccgcatgggcgaactcgtcgaaatgacatatgcgcgttggcggcgctgtggccggatcgcgcagcgcgcagagcccgatctcaaattgggtcgcggcggccttcgggacgtccagttgctagacgcgctggctctcgcccagctcatcgaccggcacggtatcggccacacggacctgccggcgggttcgctggacggtgcgtatcgcaccttgctggatgtgcgcaccgaactgcaccgggtgtcgggccgcggacgcgaccacctgctggcccagttcgccgacgagatcagcgccgcgttgggtttcggtgaccgattcgatttggcgcgcacactgtcgagtgctggccgcaccatcggttaccacgccgaagccgggctgcggactgcggcgaatgcattgccgcggcgcggcatctcggccttggtgcggcggccaaagcggcgaccgctcgacgagggtgtcgtcgagtatgccggcgaaatcgtgctcgcccgcgacgccgaacccgaacacgatcccggcctggtgctccgagtggccgccgcgtcggccgacaccggattgcccattggcgccgccaccctgagccggttggccgccagcgtcccggatctgccgactccctggccgcaagaggcattggacgacttactagttgtgctctccgccggccccaccacggtggctaccatcgaagcgctcgaccgaaccgggctctggggccggttgttgccggaatgggagcccattcgcgaccttccgccgcgcgacgtcgcccacaagtggacggttgaccgacacgtggtcgagaccgcggtgcatgcggcgccactggccacccgggtggcacgtcccgacctgcttgcgcttggcgcgctgctgcacgacatcggcaagggacggggcaccgatcacagtgtgctcggggccgaattggtaatcccggtttgcaccaggctggggttgtcgccgccggacgtgcggacgctctccaagctggtccgccaccacctgctgctgccgattacggcaacccgacgtgacttaaacgaccccaaaaccatcgaggcggtgtccgaggcgctgggtggggatccgcaactgctcgaagttttgcacgccctgtcggaggcggactcgaaggccaccggccccggggtgtggagcgattggaaggcgtcactggtcgatgacctggtgcgtcgctgccggatggtgatggccggagagtcgctgcctcaagccgaaccgactgcaccccattatctttcgctggcggccgaccacggggtgcatgtggagattagtccgcgcgacggtgaacgcatcgacgccgtaatagtggcgccggacgagcggggactggtgtcgaaagccgccgcggtgctggcgctgaactcgctgcgcgtacattcggcgtcggtcaacgtccaccagggtgtcgcgataaccgagtttgtggtgtcaccactgtttgggtccccgcccgcggcggagttggtgcgtcagcagtttgtcggtgccctcaacggcgacgtcgacgtgctgggcatgctgcagaagcgggacagcgatgccgccagcttggtatccgctcgggccggggacgtgcaggccggggtgcccgtgactcgtacggccgctccgccccgcatcctgtggctcgacaccgccgcgccggccaagctgatcctcgaagttcgggccatggatcgggcgggtttgctcgcgttgctggccggggcgctggagggcgcgggagccggcattgtctgggcgaaggtcaatacgttcggatcgaccgcggccgatgtgttctgtgtgacggtccccgcggagttggacgcgagagccgcggtcgagcaacacctgctggaggtgttgggcgccagcgtcgacgttgtggtcgacgaacccgtcggcgattag

SEQ ID NO: 414 - DNA, 738 bp, Mycobacterium Tuberculosis
gtgtaccgagtctttgaagcgctggacgaattgagcgccatagtcgaagaagcccgaggcgtgccgatgacggcaggttgcgtcgtcccgcgtggggatgtgctggagttgatcgacgacatcaaggatgcgatccccggtgagctggatgacgcgcaggacgtcctcgacgcacgtgattcgatgttgcaggacgctaagacgcacgctgactctatggtgtcctcggcgaccactgaggcggagtcgatactcaaccacgcccgcaccgaggctgaccggatcctgtctgacgcgaaggcgcaggctgatcggatggtcagcgaggcacgccagcacagcgagcgaatggtcgccgatgcacgcgaggaggcgattcgcatcgccaccgccgcgaaacgcgaatacgaggccagcgtcagtcgcgcccaggccgaatgcgaccggctgatcgaaaacggcaacatctcctacgagaaagccgtgcaggagggcatcaaagagcagcagcgcctggtatcgcagaacgaggtggttgcggcggccaacgcggaatcgacccgcctcgtcgacacggcgcacgccgaggcggaccggctacgcggagaatgcgatatctacgtcgacaacaagctcgccgaattcgaggaattcctcaacggcaccctgcggtccgttggccgcggtcgccaccagctccgcacagcggccggcactcacgactacgcggtgcgctaa

SEQ ID NO: 415 - DNA, 312 bp, Mycobacterium Tuberculosis
atgatcgagcttagctatgctccggatgtagctggccgaagatccaactggccgaagggctcgggggtcaacacctggacagccattcgctggacatttgctgaagattcaccgtacgtcggcaccggtctggagcggatggcttcagacacacacgggggcggtggcggccgaccggtcaccccgcccccgcccggtatgcaccatctcgggtgcagccgaggcgtgttgttaatctcgtcacaacgggacgccggtcacaagacgtgcgacccagccgccggcggcactctgacctcggttcttacctga

SEQ ID NO: 416 - DNA, 6567 bp, Mycobacterium Tuberculosis
atgaccgcagcgacaccagatcgccgagcgatcatcaccgaggcgctgcacaagatcgatgatctcacggcgcgcctggaaatcgccgaaaaatccagcagcgaaccgatcgcggtgatcggcatgggttgccggttcccgggcggggtcaacaaccccgaacagttctgggatttgttgtgcgccggccgaagcggcatcgtccgggttcccgcgcagcggtgggacgccgacgcctactactgtgatgatcacaccgtgccggggaccatctgcagcaccgaaggcggttttctcaccagctggcagccagatgagttcgatgcggagttcttctcaatctccccgcgcgaagcggcggcgatggacccgcagcagcgattgttgattgaagttgcgtgggaagcgctagaagacgcgggcgtcccgcaacacaccattcgcggtacgcaaacctcggtattcgtcggtgtcaccgcctacgactacatgctcacgctggcgggccggctacgacctgttgacctcgacgcgtacatcccaaccgggaactcggcgaacttcgccgccggacggctggcctacatcctcggggcacgcggacccgcggtggtcatcgacacggcctgctcatcgtcgttggtggcggtgcacctggcatgccagagcctgcgcgggcgggaaagcgatatggcgttggtgggtggaaccaaccttttgctgagcccgggacccagcatcgcttgctcgcgatgggggatgctgtcaccggaggggcggtgcaagaccttcgatgcgtccgccgatggatacgtgcgcggcgagggtgccgcggtggtggtgctcaagcggctggatgacgcggtgcgcgacggcaaccgcattcttgccgtggtacgcggttcggcggtcaaccaggacggtgccagcagcggagtgaccgttcccaacgggccagcgcaacaggcgttgctcgccaaagcattgacgtcgtcgaagttgacagcggccgatatcgactacgtcgaggcccatggaactggtactccgctgggcgacccgatcgaactcgattcactgagtaaggttttcagcgatcgagcgggttcggatcagttggtgattggatcggtgaagaccaatctcggtcacctggaagcggcggccggtgtcgccgggctgatgaaagccgtgctcgcggtacacaacggctacattccgcggcatcttaacttccaccagctgacaccacatgcaagtgaggccgcatctcggctgaggatcgccgccgatggtattgactggccaaccaccggtcgacctcgccgggcgggggtgtcgtcgttcggcgtcagtgggacgaatgcacacgtggtgatcgagcaggcacccgatccgatggccgctgcgggaacggagccgcagcgcggccccgttcccgcggtgtcgacgctggtggtgttcggcaagaccgcaccgcgggtggctgcgacggcatcggtgctggcagattggctggacggccccggcgcggcggtgccgctggccgatgtcgcgcacaccctcaaccatcaccgggcccgtcagaccaggttcggcacggtagccgctgtcgatcggcgccaagcggtgatcgggttacgcgcgctggccgcgggtcaatccgcccccggggtggtggcaccccgcgaaggctccatcggaggcggcacggtgttcgtctactcgggacgaggatcgcagtgggccggaatggggcgccaactgctggccgacgagccggcattcgccgctgccatcgccgaactggagccggaattcgttgctcaaggcgggttttcgctgcgcgacgtgatcgccggcggaaaagagttggttggcatcgaacagatccagctgggactgatcgggatgcagctggcgctgaccgcgttgtggcgctcatacggcgtgacacccgatgcggtgataggtcactcgatgggcgaagtggccgccgcggtggtggccggggcgctgaccccggcccagggattacgggtgaccgcggtccggtcgaggctgatggcgccgctgtccgggcagggcacgatggcgttgctggaactcgacgccgaagccactgaggcgctgattgccgactaccccgaggtgagcctggggatctatgcctccccacgccaaaccgtgatttccgggccgccgctattgatcgacgagctcatcgacaaggtgcgccaacagaacggcttcgctacccgagtcaacatcgaggtggccccccacaacccggccatggatgcactgcaaccggcgatgcgttcggaattggccgatctcaccccgcaaccgccgaccatcccgatcatctccaccacctacgccgacctcggcatttccctgggttccggccccaggttcgacgccgagcactgggcaaccaacatgcgcaacccggtacggttccaccaggccatcgctcatgccggcgccgatcaccacaccttcatcgagatcagcgcccacccgctgctgacccactcgatcagcgacaccctgcgcgccagctacgatgtcgacaactatctgagcatcggcaccttgcaacgcgacgctcacgacaccctcgagttccacacgaacctcaacacgacccacaccacccatcccccccagactccccacccccccgaaccccaccccgtgctgcccaccaccccatggcagcacacccagcactggatcaccgccacgtcggccgcttaccacaggcccgacacccacccgttgcttggcgtcggtgtcaccgaccccactaacggcacccgggtttgggaaagcgagctcgaccctgatctgctgtggctcgccgatcacgtcatcgacgatctcgttgtgctgcccggggcggcctacgctgagatcgcgctggcggccgcgaccgacaccttcgcagtcgagcaagatcagccctggatgatcagcgagctcgaccttcggcagatgctgcatgtgaccccaggcaccgtgttggtcaccacgctcaccggcgacgagcagcgatgccaggtcgaaatacgcacccgcagcgggtcttcgggatggaccacccacgccaccgccaccgttgcccgcgccgagccgttagcaccgctggatcacgaaggacagcggcgcgaggtaaccactgccgacctcgaggaccaactggatcccgacgacctgtatcagcgcctgcgcggcgccggccaacagcacggacccgcgtttcaaggcatcgtggggctggccgtcacgcaagctggcgtggcccgtgcgcaagtacggctacccgcatcggccagaacgggttcccgtgagttcatgctgcacccggtgatgatggatatcgcgttgcagacactgggagccacccggacggcgaccgatctggccggcggccaggacgcccggcagggcccatcttccaactcggccttggtggtaccggtgcgtttcgccggtgtccacgtgtacggcgatatcacccgcggggttcgcgcggtcggctctctggccgcagccggtgaccggctggtcggcgaggtagtcctgaccgacgcgaatggccaaccgctgctggtcgtcgatgaagtcgagatggcggtgctcggatccggcagtggcgcaacggaactcaccaaccgcctattcatgttggagtgggagcccgcaccgctggaaaagaccgccgaggctacgggtgccctgttgctgatcggtgaccccgccgcgggtgacccgctgctgcccgcgctgcagtcgtcgctgcgcgaccgcatcaccgacctcgagctggcatccgcggccgacgaagccacgctgcgcgcggcgatcagccgaacctcctgggacgggatcgttgtggtctgtccgccccgagcgaacgacgaatcgatgccggacgaggctcaactggagttggcacgcacacgcacgctgctggtcgccagcgtggtcgagaccgtgacgcgaatgggtgcccgcaagagcccccgactgtggatcgtcacccgtggcgctgcacagttcgacgcaggcgagtcggtcacgttggcgcagaccggcctacgtggcatcgcacgggtgctgacatttgagcattcggagttgaataccaccctcgtagatatcgaaccggacggcaccggctcgctggccgccctggccgaggagttgcttgccggttccgaggccgacgaggtcgccttgcgcgacggtcaacgctatgtcaaccggctggtgcccgcacccaccacgaccagtggtgatctcgccgccgaagctcgccaccaggtggtgaacctggacagctcgggcgcttccagggcagctgtccgactgcagatcgatcaacccggacggctggacgcactaaacgttcacgaggtgaaacggggcagaccgcaaggcgatcaagtcgaggttcgcgtcgtcgccgccggactcaacttcagcgacgtgctcaaagcgatgggcgtgtatccgggactcgacggtgccgcgccggtgatcggcggcgaatgtgtcggctacgtgacggccatcggtgacgaggttgacggcgtcgaggtcggacagcgagttatcgcattcggccctggcacattcgggacccatctggggaccatcgccgatctcgtcgtcccaattccggacacgctagccgacaacgaggcggccacgttcggcgtcgcctatctcaccgcctggcactcgctgtgcgaggtcgggcgcctatcccccggcgaacgcgtgctcatccattccgccaccggcggtgttggaatggcggcggtctcgatcgcgaagatgatcggcgcccgcatctacacgacggccggttcggacgccaaacgggaaatgctttccaggctcggtgtcgagtacgtcggcgactcgcgaagcgtggatttcgctgacgagatcctcgagctgacagacggctacggtgtggacgtcgttctcaattcgctggcgggcgaggcgattcaacgcggcgtgcagatccttgcgcccggtggccggttcatcgaactgggcaagaaggacgtctacgccgatgccagcttgggcttggccgcgctagccaagagcgcgtccttctccgtggtcgacctcgacctgaatctcaagctgcagccggcgcgctaccgccaactcctgcaacacatcctgcagcacgtggcggatggcaaactcgaggtacttcccgtcaccgcatttagcctgcacgatgcggccgacgcattccggcttatggcatccggtaaacacaccggcaagatcgtcatctcgataccccagcacggcagcatcgaggcgatcgctgccccgccaccacttcctctggtcagccgcgacggcggctacctcatcgtcggcggtatgggtggtctcggattcgtcgtcgcgcgctggctggctgagcaaggtgcgggactgattgtcctcaacggacgctcggcccccagcgacgaggtggcagccgctatcgcggagctgaacgcctccggtagccggatcgaggtgatcaccggcgacatcaccgagccagacaccgccgagcggctggtgcgggcggtcgaagacgccgggttccggctggccggggtggtgcacagcgcgatggttctcgccgacgagatcgtgttgaacatgaccgattccgccgctcggcgagtgttcgccccgaaggtcaccggcagctggcggcttcatgtggccaccgccgcgcgcgacgtcgactggtggctgaccttctcctcggccgccgcgctgctgggcactcccgggcagggcgcgtacgccgccgccaactcgtgggtcgacggcctggtcgcgcatcggcgctcggccggacttcccgctgtcgggatcaactggggcccgtgggccgacgttggacgcgcgcagttcttcaaagacctcggggtggagatgatcaacgccgagcaggggcttgccgccatgcaggcggtactcaccgccgatcgcgggcgcaccggtgtgttcagcctcgacgcgcggcagtggttccaatcgttccccgctgtggcggggtcctcgctgttcgcgaagctgcatgactcggcggcccgcaaaagtgggcagcggcgcggcgggggcgcgattcgcgctcagctagacgccctcgacgcggccgaacgcccaggccacctcgcgtccgcgatcgccgacgagatccgtgcggtgctgcgctcaggcgatcccatcgatcaccaccgaccgctggaaaccctgggactcgactcgctgatgggcctggaattgcgcaatcggctggaagcaagtctgggcatcacgttgccggtcgcgttggtgtgggcatacccgacgatcagcgatctcgcgaccgccctgtgcgaacgaatggactacgcgacacccgcggctgcgcaggagatttccgatacagaacccgaactgtccgacgaggagatggatttgctcgccgatctggttgacgccagcgagctggaagctgcgacgcgaggcgagtcatga

SEQ ID NO: 417 - DNA, 5484 bp, Mycobacterium Tuberculosis
atgacaagtctggcggagcgcgcggcgcaactgtcgccgaacgcgcgagcggccctggcgcgcgagctcgtccgtgcgggtacgaccttcccgaccgacatctgcgagccggtggcggtggtgggcatcggctgtcgctttccggggaatgtgactgggccagagagcttttggcagctactggccgacggtgtggacacaatcgagcaggtgccgcctgatcggtgggatgcggacgcgttctacgatcccgatccttcggcgtcgggtcggatgacgacgaaatggggtggtttcgtttccgatgtcgacgcgttcgacgccgactttttcggaatcactcctcgggaagccgtggcgatggacccgcagcatcggatgctgctcgaggttgcctgggaagcgttggagcacgcgggtattccgccggattccttgagcggcactcgaaccggcgtgatgatgggtctgtcgtcgtgggactacacgatcgtcaatatcgagcgcagagccgacatcgacgcgtacctgagcaccggaaccccgcactgtgccgcggtggggcggatcgcgtatctgttgggattgcgtggtccggccgtcgccgtagataccgcttgttcgtcgtcgctggtggcaattcacttggcgtgtcagagccttcgcctgcgtgaaaccgacgtggcattggcgggcggggtgcagctcaccttgtcaccgttcaccgccatcgcgctgtccaagtggtcggcgctgtcaccgaccggccgatgcaacagcttcgacgccaacgcggatggattcgtgcgcggcgagggctgcggcgtggtggtgctcaagcggttggccgacgcggtgcgcgaccaggaccgggtgcttgcggtggtccgcggttcggcaactaactccgatggtcggtccaacggcatgaccgcaccgaacgcgctggcgcagcgtgacgtgatcacatccgccctcaagcttgcggatgttacccctgacagcgtgaactatgtcgaaacacacggcaccggaacggtgttgggggaccccatcgagttcgagtcgctggcggccacttatggcctgggtaaaggccagggcgagagcccgtgcgcattggggtcggtcaagaccaacatcggccacctggaggcggccgccggtgtggctggattcatcaaggcggtgctggcggtgcaacgtgggcacattccccgcaacttgcacttcacccggtggaacccggccatcgacgcgtcggcgacgcggctgttcgtgccgaccgaaagcgccccgtggccggcggctgccggtccacgcagggctgcggtgtcatcgttcggcctcagcgggaccaacgcgcacgtggtggtcgagcaggcacccgacaccgcagtagccgcagccggcggcatgccgtatgtttcggcgctgaacgtctccggcaagacggccgcgcgggtggcgtcggcggcggcggtgctggccgactggatgtcggggccgggcgcggcggcaccactggccgacgtggcacacacgttgaaccggcaccgggcccggcacgccaagttcgccaccgtcatcgcgcgtgaccgcgccgaggcgatcgcggggttgcgagcgctggcggccggacaaccacgcgttggggtggtggattgcgaccagcatgccggtgggcctggccgggtttttgtgtattcgggtcagggctcgcagtgggcgtcgatgggccagcagttgctggccaacgaaccggcgttcgccaaggcggtagccgagctggatccgatattcgttgaccaggttggcttttcgctgcagcaaacgcttatcgacggcgacgaggtggtgggcatcgaccgcatccagccggtgctggtcgggatgcagttggcgctgaccgagttatggcggtcctatggggtgattccagatgccgtgatcgggcactcgatgggtgaggtgtcggcggcagtggtggccggcgcgttgacgcccgagcagggcttgcgggtcatcaccacccggtcgcggttgatggcgcggctgtcggggcagggagcgatggcgctgctcgagctggatgccgacgccgccgaggcgctgattgccggctatccgcaggtgacgctggcggtgcatgcgtcaccgcgccagacggtgatcgccgggccgcccgagcaggtggacacggtgatcgcggcggtagcgacgcaaaaccggttggcgcgccgcgtcgaagtcgacgtggcctcccatcacccgatcatcgatcccatactgcccgagttgcgaagcgcgttagcggatttgactccgcagccgccgagcatcccgatcatttccactacgtacgaaagcgcgcagccggtggcggatgccgactattggtcggccaacctgcgcaacccggtgcgattccaccaggccgtcaccgccgccggtgtcgaccacaacaccttcatcgaaatcagccctcaccccgtgctcacgcacgcactcaccgacaccctggatccggacggcagccatacagtcatgtcgacgatgaaccgcgaactggaccagacgctgtatttccacgcccaactcgccgcggtcggtgtggctgcgtccgagcacaccaccggtcgccttgtcgacctgccccccacaccgtggcaccatcagcgattctgggtcacggatcgttcggcgatgtccgagctggccgcgacccacccgctcctgggcgcgcacatcgagatgccgcgcaacggagaccatgtctggcagaccgatgtcggcaccgaggtctgtccctggttggcagaccacaaggtgttcggtcaacccatcatgccggccgcggggttcgccgagatcgccttggcggcggccagcgaagccctcggcacagccgccgacgccgtcgcacccaacatcgtgatcaaccagttcgaggtggagcagatgctgcccctcgacggccacacgccgctaacgacgcagttaattcgcggcggggacagccagattcgggtcgagatctattcccgcacgcgtggcggagagttctgccgacacgccacggccaaggttgaacaatcgccgcgcgaatgtgcgcacgcgcacccggaagcccaaggtcccgccaccgggacaacagtgtcgccggccgatttttatgccctgctccgccaaaccggccaacaccatggtccggcgttcgcggccttaagccggatcgtgcgcctggccgatggttccgcggaaaccgagatcagcattcccgacgaggcgccgcgccatcccgggtatcggctgcaccccgtggtattggatgcggcattgcaaagcgtgggtgccgcgatacccgacggcgagatcgcggggtcggcggaagccagctatctgccagtgtcgttcgagaccatccgggtgtaccgcgacatcggtcggcacgtcaggtgtcgtgcccacctgacaaacctcgacggcggcaccggaaagatgggcaggatcgtcctaatcaacgacgccggccacatagcggccgaagtggacggcatctatctgcgtcgtgtcgaacgccgtgcggtacccctgccactagagcagaagatcttcgatgccgaatggaccgaaagcccgatcgcagccgtgccggctccggagccagctgccgagacgacgcggggaagttggctggtactcgccgatgcaacggtggatgcgccaggcaaggcccaggccaagtcgatggccgacgacttcgtgcagcagtggcgctcaccgatgcggcgggtgcacaccgccgatatccacgacgaatcggcggtgctggccgcatttgcagaaacggcaggcgatcccgagcacccgccggttggcgtggtggtgttcgtcggcggtgcctcgagtcgactggacgacgagctggcggcggcgcgcgacacggtgtggtcgatcaccacggtggttcgtgcggtcgtcggcacgtggcacggccgatcaccgcggctatggctggtcaccgggggcggactttccgttgccgacgacgagccgggaacacccgcggcggcttccttgaaagggctggtgcgggtgctcgccttcgagcacccggacatgcgcaccaccctggtcgatctggacatcacacaagacccgctgaccgcgctgagcgcggaactgcggaatgccgggagtgggtcgcgccatgatgacgtgatcgcgtggcgcggcgagcgcaggttcgtcgaacggctgtcgcgcgccacgatcgatgtatccaaagggcatccggtggtgcgccagggagcgtcgtacgtcgtcaccggcggcctcggcggtctcggcctggtcgtcgctcgttggctggtggaccgcggcgccggccgggtggtgctgggtggccgcagcgatcccactgacgagcagtgcaacgtcctggccgaactgcagacccgcgccgagatcgtggttgtccgtggcgacgtggcatcgccgggggtggcagaaaagctgattgagacggcccgacagtctgggggccaattgcgcggcgtcgtgcacgccgccgcggtcatcgaagacagcctggtgttctctatgagcagggacaacctagaacgggtgtgggcacccaaggccaccggtgcgctgcgcatgcacgaagccaccgctgactgcgagctcgactggtggctcggattctcttccgccgcttcgctattgggttctcccgggcaagcggcctacgcgtgcgccagcgcgtggctggacgcgctggtcggatggcgcagggcatccggcctgccggccgcggtgatcaactggggtccgtggtcggaggtaggcgtcgcccaggccttggtgggcagtgttctcgacacgatcagtgtcgcagaaggcatcgaggctctcgactcattgcttgccgccgaccggatccgcactggagtggctcggctgcgtgccgatcgggccctggtcgcattcccggagatccgcagcatcagctacttcacccaggtggtcgaggagctggactcggcgggtgacctcggcgactggggcgggcccgacgcgcttgccgacctcgacccgggcgaggcgcggcgcgcggtgaccgagcggatgtgtgcgcgcatcgctgcggtgatgggctacactgaccagtcgactgtcgaacccgccgtgcccttggacaagcccctgaccgagctggggctggattctctgatggcggtacgaatacgcaacggcgcgcgggcggatttcggcgtggaaccgccggtagcgctgatactgcaaggcgcgtccttgcatgacctgacggcggacttaatgcgccaactcgggctcaatgatcccgatccggcgctcaacaacgctgacactattcgcgaccgggcgcgccagcgcgcggcagcgcgacacggagccgcgatgcggcgccgacctaaacctgaagtacagggaggataa

SEQ ID NO: 418 - DNA, 717 bp, Mycobacterium Tuberculosis
gtgagtcagtgtcccggctggccgatcgcgcccgcgccgagaactggagccacgaagaatacctggccgcctgcctgcagcgggaagtgtcagcccgggagtcccatggtggtgagggccgcatccgcgccgcccgcttcccggctcggaagtcgttggaagagttcgactttgagcatgctcgtggcctcaaacgcgacaccatcgcacatctgggcaccctggatttcatcaccgcccgcgataacgtcgtgtttttgggccccgcctggcaccgggaagactcatcttgcggtcggcctggcgatacgcgcgtgtcaggccggtcatcgggtgctgttcgccaccgccgccgaatgggtagcacggctcgccgaggctcaccacgccgggcgcatctacgccgaactcacccggctttgccgctatccgctcctggtggttgacgaagtcggctacattccgtttgagcccgaggccgccaacctcttcttccagctggtgtcctcccggtatgagcgggccagcttgatcgtcacgtccaataaggccttcggccggtggggcgaggttttcggcggcgacgacgtcgttgctgccgccatgatcgaccgcctcgtccaccatgctgaagtcgtcgccctcaaaggcgacagctaccggctcaaagaccgcgacctcggccgcgtcccaccagccggaaccaccgaagaataa

SEQ ID NO: 419 - DNA, 702 bp, Mycobacterium Tuberculosis
atgaatgatggaaaacgggcggtgacgtccgctgttctggtggtgctaggtgcctgcctggcgttgtggctatcaggatgttcttcgccgaaacctgatgccgaggaacagggtgttcccgtgagcccgacggcgtccgaccccgcgctcctcgccgagatcaggcagtcgcttgatgcgacaaaagggttgaccagcgtgcacgtagcggtccgaacaaccgggaaagtcgacagcttgctgggtattaccagtgccgatgtcgacgtccgggccaatccgctcgcggcaaagggcgtatgcacctacaacgacgagcagggtgtcccgtttcgggtacaaggcgacaacatctcggtgaaactgttcgacgactggagcaatctcggctcgatttctgaactgtcaacttcacgcgtgctcgatcctgccgctggggtgacgcagctgctgtccggtgtcacgaacctccaagcgcaaggtaccgaagtgatagacggaatttcgaccaccaaaatcaccgggaccatccccgcgagctctgtcaagatgcttgatcctggcgccaagagtgcaaggccggcgaccgtgtggattgcccaggacggctcgcaccacctcgtccgagcgagcatcgacctcggatccgggtcgattcagctcacgcagtcgaaatggaacgaacccgtcaacgtcgactag

SEQ ID NO: 420 - DNA, 2118 bp, Mycobacterium Tuberculosis
atgcggaatgggaatctagcggggctcctggctgagcaggcatcggaggcgggatggtacgaccggccggccttctatgcggccgatgtggtgactcatggtcaaatccacgacggtgccgcacgtcttggggaagtgctgagaaaccgcggactatccagtggtgatcgggttctgttgtgcctgccggattcgcccgacctggtgcagctattgctggcgtgcctggctcgtggggttatggcgtttctagcgaatccggagctgcatcgcgacgaccacgcgttggccgcacgcaacacggaaccggcgcttgtcgtcacctcggatgcgctgcgcgatcggtttcagccgtcgcgggtggccgaagccgcggaactcatgtccgaggcggctcgagtcgcgcctggaggctacgaaccgatgggtggtgacgcactcgcatacgctacgtatacgtctggtaccacgggtccgccgaaggcggcgattcatcggcacgccgacccgttgacgttcgtggacgctatgtgtcgtaaagccttgcggctcactcctgaagatactgggctatgtagtgcacgcatgtattttgcttacggcctaggaaattcggtctggtttccactcgcgacaggtggttccgcggtcatcaattcggcgccggtaactccagaagcagcggccattctaagcgcgcgatttgggccatcggtgctctacggtgtgccaaatttctttgccagagtcatcgactcatgttctcctgattccttccgttcgcttcgatgtgtggtgtcagccggggaggcccttgagctgggtcttgccgagcggctcatggaattctttggcggcatccccattctggacggtattggatctacggaggtcgggcagacgttcgtatcgaatcgggttgacgaatggcgcctggggacgctgggaagggtgctgccgccctacgagattcgtgttgtagcgccggatggaacaactgccgggcctggggttgagggcgacctatgggtccgcggaccggcgatcgctaagggctattggaatcggcctgattcccccgtcgcgaatgagggttggctcgacacgcgggacagggtgtgtatcgacagcgacgggtgggttacctaccgctgccgcgccgacgacaccgaggttatcggaggggtcaacgttgatccgcgtgaggtcgagcgactcatcatcgaggacgaagccgtggctgaggccgcggttgtcgcggtaagggagtccacgggcgcgtcgacactgcaggcttttctggttgcgaccagcggtgccaccatcgatgggtcggtcatgcgagaccttcaccgcggattgctcaaccgattgtctgcgttcaaggtgccgcataggtttgccgttgttgatcgactccctcgaaccccgaacgggaaattggtgcgtggcgccctgcgcaagcagagtccaaccaaaccgatttgggaactctcgttgactgaacctgggtccggcgtgcgggcgcagcgtgatgacctgtcggcgtccaacatgacgatcgccggaggaaacgacggcggggcgactcttcgcgagcggttggtcgctttgcggcaagaacgtcagcggctggtggtggatgccgtatgcgccgaggccgcgaagatgttaggtgagccagatccttggtcggtcgatcaggatctcgccttctcggagctgggttttgactcgcaaatgacagtcacgctgtgcaagcgattggcggcagttaccggcctgcggttacccgagacggttgggtgggactacgggtcgatatcgggattagcccagtatttggaggccgaactggccggcgggcatggtcgattgaaatcagccggtccggtgaatagcggcgcgacgggtctttgggcaatcgaagagcagttgaacaaggtcgaagagctggtggccgtcatcgccgacggcgagaagcagcgggtggccgaccgtttgcgtgccctgctgggcaccatcgccggcagcgaggcgggcctgggcaagctgatccaggctgcttcgactcctgacgaaattttccagctaatcgattccgaacttgggaagtga

SEQ ID NO: 421 - DNA, 1146 bp, Mycobacterium Tuberculosis
gtgggcggacttcgtttcggttttgttgatgccctcgtgcactcgcggttgccgccgaccctgccggcacggtctagcatggcggccgccaccgtgatgggcgccgactcgtattgggtcggcgaccatctgaatgcgctggtgccgcgctcgattgcgacttccgaatatctcggaattgcggcgaaattcgtgcccaagatcgatgccaattacgaaccgtggacgatgcttggaaacctcgccttcgggttgcccagccgtctgcgactgggcgtgtgcgtgaccgatgcaggtcggcgcaatccagcggtcacagcccaggctgccgcgactttgcacttgcttacccgaggccgagccatattgggtatcggtgtcggggaacgtgaaggcaacgagccctacggtgtggagtggaccaaaccggtggcgcggttcgaagaagccctggccaccattcgcgcgttgtggaattcaaacggggagcttatctcacgtgaatcgccatactttccgttacataacgccttgttcgaccttccgccataccgtgggaaatggcccgaaatctgggtcgcggcccacgggccgcggatgttacgggccaccggacgttacgccgatgcctggattcccattgttgtggttcgtcccagcgactacagtcgcgcactcgaagcggtgcgcagcgcggcgtccgatgccggacgcgacccaatgtcgattactccggcggcggtgcgcggcatcatcactggacggaatcgcgacgacgtggaagaggcgctggaatctgtcgttgtgaagatgaccgcgctcggggtacctggggaagcctgggcgcgtcacggcgtcgagcatccaatgggagccgacttctccggtgtgcaggacatcatcccgcaaaccatggacaaacagacggttttgtcctacgcggccaaggtcccggctgcgcttatgaaagaagtcgtcttcagtggaacccctgacgaagtcatcgatcaagtagcggaatggcgagatcacgggctgcgctacgttgtgctgatcaacggcagtttggttaaccccagcctgcgcaagacggtgacggctgtcctgccgcacgccaaggttttgcgcgggctcaagaagctatga

SEQ ID NO: 422 - DNA, 1350 bp, Mycobacterium Tuberculosis
gtgcgcgtgtcgtgcgtgtacgctacggcgtcgaggtggggcgggccaccggttgctagcgaggtgagaggggacgcggccatcagcacgacaccggacgccgcacctgggcttgccgcacgcaggcgccggatccttttcgtcgcggaagcagtgaccctggctcacgtcgtccggccattcgcgcttgcgcagtcgctggaccctagtcgttatgaagtgcacttcgcctgcgacccgcgctacaaccagcttctaggtccgctccctttccgtcaccatgcgattcacaccatccccagcgagcggtttttcggcaatctgactcagggtcgtttctatgccatgcggacgctgcggaagtacgttgaggcggacctgcgggtcctggatgagatcgcgccggacctcgtcgtcggtgaccttcgcatttcactgtcggtcagcgcccgactggccggcattccttacatcgcgatcgcgaatgcctactggagtccgtacgcgcagcggcgttttccgctgcccgacgtgatatggacccgcttgttcggcgtcaggttggtcaagctcctctaccgcctggaacgccctttgctcttcgccctgcagtgcatgccgctcaactgggtccgccgcaggcacgggctgtcgagtctggggtggaacctgtgccgcattttcaccgacggggaccacaccctgtatgctgacgtgcccgagctgatgcccacctacgacttgccggccaaccacgagtaccttggcccggtcctgtggtcgcccgccgggaagccgccgacatggtgggattcgctgccaaccgaccggccgatcgtgtacgcaaccctgggcacgtccggcgggagaaatctgttgcaactggtgttgaacgcgttggctgagttgccggtgacggtgatcgcggccaccgcgggccgcagtgacctgaagaccgtgccggccaacgccttcgtggcggactacctgccgggtgaggccgctgcggctcgctcggccgtggtggtctgcaatggcgggagtttgacgacccagcaggccttggtggccggggtgccggtgatcggggtcgcgggcaatctcgatcagcacttgaatatggaggccgttgagcgggccggggcgggcgtgctgctgcgaactgagcggctgaagagtcagcgggtggcaggggccgtgatgcaggtgatcagtcggtccgagtaccgacaagccgccgcgcgactcgccgatgccttcggacgagaccgcgttggattcccgcagcatgtggagaatgctctgcgcctcatgccggagaaccggccccggacatggttggccagctag

SEQ ID NO: 423 - DNA, 2229 bp, Mycobacterium Tuberculosis
atgatgagcaatgatcgcaaggtgaccgaaatcgaaaacagtcccgtcacagaggtgcggccagaggagcatgcgtggtatccagacgactcggcgctggcggcaccgcccgctgccacccccgccgcgattagcgaccagctaccctcggatcgctacctgaaccgggagctgagttggctggacttcaacgcgcgcgtgcttgccctggccgccgataagtcgatgccattgctcgagcgcgccaagtttctggcaatcttcgcgtccaatctcgacgagttctacatggtccgggtggccggcctcaaacgccgcgacgagatggggttgtcggtgcgctccgccgacggtctaacaccgcgcgaacaactaggccggatcggcgagcagactcaacagctcgccagccggcatgcccgggtgttcctcgattcggtgctacccgcgctcggcgaggaaggcatctacatcgtcacctgggccgatttggatcaggctgagcgcgaccgattgtcgacctatttcaacgaacaggtcttccccgtcctgaccccgctggccgtcgatcccgcccacccgttcccgtttgtcagcgggttgagcttgaacctggcggtcacggtacgccaacctgaagacggcacccagcatttcgcgagggtcaaggtgcccgacaacgtcgaccgcttcgtcgaactcgctgcacgtgaggccagcgaggaagctgcggggaccgaaggccggaccgcgctgcggttcctgccgatggaggagctgatcgcggccttccttccggtgcttttcccgggtatggaaatcgtcgagcaccacgcatttcgcatcactcgcaacgctgacttcgaggttgaagaggatcgcgacgaggacctactgcaggcgctcgagcgagaactggcccgccgccggttcggttcaccggtgcgactcgagatcgcagacgacatgaccgagagcatgctggagttgctgcttcgcgaactcgacgtgcatcccggtgatgtcatcgaagtgcccgggctgctcgacctatcgtcgttgtggcagatctacgccgtggaccgcccgacgcttaaggatcggacattcgtcccagctacccatcccgccttcgccgagcgggaaacacccaaaagcatcttcgcgacgctgcgcgaaggcgatgtgctggttcaccatccgtatgactcgttctccaccagcgtgcagcgattcatcgaacaggccgcggccgaccccaacgtgctggcgatcaaacagacgctgtaccgcacctccggcgactcgccgatcgtccgggcgctgatcgacgccgccgaagccggaaagcaagtggtggcactggtcgagatcaaggcacgcttcgacgaacaggccaacatcgcctgggcgcgcgcactagaacaagccggcgtgcatgtggcgtacgggctcgtcgggctcaagacgcactgcaagaccgccttggtggtgcgccgcgaaggtccgacaatccggcggtactgccatgtcggcaccggcaattacaacagcaagacagcacgactctacgaggacgtcggactgctgaccgctgcacccgatatcggcgccgacttgaccgacttgttcaattcgctcaccggctactcacgcaagttgtcctaccgcaacttgttggtggccccgcacggaatccgcgccggcatcattgaccgcgtcgagcgggaggtcgcggcgcaccgtgcagagggtgcccacaacggcaaaggccgcatccgactcaagatgaatgcccttgttgatgagcaggtcatcgatgcgctgtaccgcgcgtcgcgagccggtgtgcggatcgaggtggtggtacgcggcatctgcgcgctgcgtccaggtgcgcagggcatttcggaaaacatcatcgtgcgctcgattctcggccgcttcctcgagcactcgcggatcctccatttccgtgccatcgacgagttctggatcggcagcgccgacatgatgcaccgcaacctcgaccggcgagtcgaggttatggctcaagtcaaaaacccgaggctgaccgcgcagctggacgaattgttcgaatccgcactggacccgtgcacccggtgctgggagctcgggcccgacgggcagtggaccgcgtcgccgcaagaaggccatagcgtgcgcgaccatcaggaatcgctgatggaacggcaccgcagcccctga

SEQ ID NO: 424 - DNA, 861 bp, Mycobacterium Tuberculosis
atgtgtgtgacctgggccgaaatgcccaagatcgcagccctgatccgccacatcgaagacctacacgcccgccacggtcgctcgtacatactgagggccgggatctcatccttgttccgctacatcgaaggcgtgcacggcgaaagaccctggggcactgtcttggatgccggtaccggtgtgaaatcgcttcagtggatacagactttgccgaccgagcgctggacggcggtcacggccgcccgcagcctggcggacaagacccgcgccgcgttgggtagcgccatgcgcccgcaggaccgcctgctcgtcggcaactgggtagacgacagccttcttgccggcgagacgttcgacaccatcttggtcgactacctggtcggggccatcgaaggcttcgccccgtactggcaggaccgcgtgttcgagcggttgcgcccgcatctcgccgatcatggtcgtctttacctagtcggcttggagccctacgtgcaattcgagccggaaaccgaaagtggcaaaatcatctgggaaatcggtcgcgtgcgcgacgcctgcctgttgcttgccggcgaacgaccgtaccgagagttcccgctggactggatgctggggcgactgggccttgcgggctttcgcattcttgaagcgcgccgcttccccatccgctaccgagctcgctacgtgaacggccaactcaacatgtgcttggcccgaatcgagcgattctcctccaacgggcttggcatggcaatgcgtgcctatgtggaagaactgcgcgctcgggcattgcagctcaacgagcggcaagacggtctgtggcacggcaatgactatgtgatcgcggtcgaaccgatgtag

SEQ ID NO: 425 - DNA, 1011 bp, Mycobacterium Tuberculosis
atgaaactcgcgatcattgccggtgacgggatcgggcccgaggtaaccgccgaggcggtcaaagtgctcgacgcggttgtgccgggcgtccagaaaaccagctatgacctgggtgcgcggcgctttcatgccaccggcgaggtgctgccggactcggtggtggccgagctgcgcaaccacgacgcgatcctgctcggggcgatcggtgacccgtcggtgccaagcggcgtcttggagcgcggtctgttgctgcgactgcgcttcgagctggatcaccacatcaacctgcgtccggcccggctgtatccgggggtggccagcccgctgtccggcaatcccggcatcgacttcgtggtggtgcgcgagggcaccgagggaccctacaccggcaacggcggggcgattcgcgtcggcacgcccaacgaggtggccaccgaagtcagcgtgaacaccgcgttcggtgtgcggcgtgtggttgccgacgcgttcgagcgggctcgacggcgtcgcaagcatctgacattggtgcacaaaacgaacgtgttgaccttcgccgggggattgtggttgcggaccgtcgacgaggtcggcgaatgctacccggacgtcgaggtggcctaccagcacgtcgacgccgccaccatccacatgatcaccgacccgggtcgcttcgacgtgatcgtcaccgacaacctgttcggcgacatcatcaccgatctggccgcggcggtatgtggcggtatcggcttggcggccagtgggaatatcgacgcgacccgggccaacccgtcgatgttcgagccggtgcatggcagcgcgccggacatcgccggtcagggcatcgccgacccgacggcggcgatcatgtcggtggcgttattgctgtcccaccttggcgaacacgacgcggctgcccgggtggaccgggccgtcgaggcccatttggccacgcgtggcagcgaacggcttgccaccagcgatgtcggcgaacggattgccgccgcgctctag

SEQ ID NO: 426 - DNA, 1857 bp, Mycobacterium Tuberculosis
gtgagcgcaccaaccaagccacactcaccgacattcaagccagagccacacagcgcggcgaatgagccaaagcacccggcggctcgtccgaaacatgttgcactgcagcagcttaccggtgcacaggcggtcatccggtcgctggaggaactcggcgtcgacgtcattttcgggattccgggcggtgcggtgctgccggtgtatgacccgctgttcgactcgaaaaagctgcgccacgtgctggtccgccacgaacagggcgccgggcatgccgccagcggctacgcgcacgtcaccggccgggtgggcgtgtgcatggcaacgtcgggtcccggagcgaccaacctggtgaccccgctggccgacgcgcagatggactcgatcccggtggtcgctatcaccggtcaggtcgggcgggggctgatcggcaccgacgccttccaggaggccgacatctcgggcatcacgatgccgatcaccaagcacaactttctggtccgctccggtgacgacattccgcgggtgctggccgaggccttccacatcgcggcctccggccgtccgggcgcggtgctggtcgacatccccaaggacgtgctgcagggccagtgcacgttcagctggccgccgcggatggagctgcccggctacaagcccaacaccaaaccgcacagccggcaggtccgcgaggccgccaagctgatcgcggccgcgcgcaagccggtgctgtatgtcggcggcggcgtcatccgcggtgaggccaccgagcagctccgggagctggccgagctgaccggcatcccggtggtcaccacgctgatggcccgcggcgcgtttcccgacagccaccggcaaaacctcggcatgcccggcatgcacggcacggtggccgccgtggcggcgctgcagcgcagcgacctgctgatcgcgctgggtacccgcttcgacgaccgggtgaccggcaagctcgactcgttcgcgccggaagccaaggtcatccacgccgacatcgacccggccgagatcggcaagaaccgccacgccgacgtgcccatcgtcggtgacgtcaaggccgtcatcaccgaactgatcgcgatgctgcgccaccaccacattcccggcaccatcgagatggccgactggtgggcatacctgaacggtgtgcgcaagacctatccgctgagctatgggccgcagagcgacggcagcctgagcccggaatacgtgatcgaaaagctcggcgagatcgccgggccggacgccgtcttcgtcgccggcgtcggccagcaccagatgtgggccgcgcagttcatcagatacgaaaagccgcgcagctggctgaactccggcggtctgggcaccatggggtttgccatcccggcggccatgggcgccaagatcgccctccccggcaccgaggtctgggcgatcgacggcgacggttgcttccagatgaccaaccaggagctggccacctgcgcggtcgagggcataccggtcaaggtggcgctgatcaacaacggcaacctgggcatggtgcggcagtggcagagcctgttctatgccgagcggtactcgcagaccgacctggccactcattcgcaccgcatccccgacttcgtgaaactggccgaggccttggggtgtgtggggttgcggtgcgagcgggaagaggacgtcgtcgacgtcatcaaccaggcgcgggcgatcaacgactgcccggtggtgatcgacttcatcgtcggtgccgacgcgcaagtgtggccgatggtggccgcgggcaccagcaatgacgagatccaggccgcccgcggcattcgccccctgttcgacgacatcaccgaaggccacgcctga

SEQ ID NO: 427 - DNA, 840 bp, Mycobacterium Tuberculosis
gtgaccagttcgaatgactcacattggcagcggccggatgattcgcctgggccaatgcctggacggcctgtctcggcaagcctggtcgaccccgaggatgacctgacgccggccagatatgccggggactttggcagtggaaccaccaccgttatcccgccctatgatgccgctagctctggtgtcggcaactccgggtacagcctgatcgaagctgcggagccgttgccctacgtccagccgcagccgggccggcaggtaccggcgggatctgccggaatcgacatggacgacgacgagcgggtacgcgccgcaggtcggcgcggcacccagaatctcgggctgctgatattgcgggtcggtctgggcgcggtccttatcgcccatgggctgcagaaattgttcggctggtgggacggccagggtctggccggattccagaactcgctgtccgacattggttaccagcacgccgagatcctcgcttatgtgagcgctggcggcgagatcgtcgccggagtgctgctggtgttgggtttgtttactccgctggcggccgcgggcgcgctggccttcttgatcaacggcctgctcgccggcatctcggcacagcattcgcggcccgtcgcgtacttcctgcaggacgggcatgaataccagatcaccctggtcgtgatggcggtcgccgttatcttgagtggtcccggccgctacggtctggacgcggcccgcggctgggctcatcggccatttatcggatcgtttgtagcgctgttgggtggcatcgcggcgggtattgccgtatgggtgctgctcaacggggcaaatccgctggcctga

SEQ ID NO: 428 - DNA, 1530 bp, Mycobacterium Tuberculosis
atgactgttgctgccggggcagccaaggccgcaggggctgaactgctcgattacgacgaggtcgtcgcgcgcttccagccggtactcggcctcgaggtgcacgtcgagctgtccactgcgaccaagatgttctgtggctgcaccaccacattcggcggcgagccaaacacccaggtgtgtccggtgtgtctgggcttgcccggttcgctgccggtgctcaaccgggccgccgtggagtcggcgatccgcatcgggctggcgctgaactgcgagatcgtaccctggtgtcgcttcgcccggaagaactacttctaccccgacatgcccaagaactaccagatctcacagtacgacgagccgatcgccatcaacggctacctggacgcgcctttggaagacggcaccacttggcgggtggagattgagcgagctcacatggaagaagacaccggcaagctcacccacatcggcagcgagacgggccggatccacggtgccaccggttcgctgatcgactacaaccgtgccggcgtgccgctcatcgagatcgtcaccaaacccatcgtgggcgccggtgcccgggcgccgcagatcgcccggtcctatgtgacggcgttgcgggatctgctgcgcgcattagatgtatctgatgtccggatggaccagggttcgatgcgctgtgacgccaacgtgtcgctgaagccggccgggacgaccgaattcggcacccggaccgagaccaagaacgtcaactcgctgaagagcgtcgaagtcgccgtccgctacgaaatgcagcgccagggcgctattttggcgtctggtggtcggatcacccaggaaaccagacactttcacgaggccggttacaccagcgcgggccgcaccaaggagaccgccgaggactatcggtacttcccggagccggatttggagcctgtcgcgcccagtcgcgagctggtcgagcgactacgccagacgatccccgaattgccgtggttgagccgcaggaggattcagcaggagtggggcgtttccgacgaggtgatgcgcgatctggtcaacgccggcgccgtcgaattggttgctgccaccgtcgagcacggcgcgtccagcgaggcggcgcgcgcctggtggggaaacttcctggcgcaaaaggccaacgaggccggcatcgggctggacgaactggccatcactcctgcccaggtcgcagccgtggtggcattggtcgatgagggcaagctgtccaacagcttggcccgccaagtcgtggagggtgtgctggccggtgaaggtgagcccgaacaggtgatgactgcgagagggttggcgttggtccgcgacgactcgttgacccaggccgcggtcgacgaggccctggccgcaaatcctgatgtggcggacaagattcgcggcggcaaggtggccgcggccggcgcgattgtcggtgcggtgatgaaggcgacccgcggacaggccgacgcggcccgagtgcgcgaactcgttctagaggcctgcgggcagggttag

SEQ ID NO: 429 - DNA, 1485 bp, Mycobacterium Tuberculosis
gtgacggacatcatccgatccgacgccgcgacgctggccgccaagatcgccatcaaggaggtgtcgtcggccgagatcacccgggcctgcctggatcagatcgaggcgaccgacgagacgtaccacgccttcctgcatgtggcggccgatgaggcgctggcggcggcggccgccatcgacaagcaggtggccgctggagaacccttgccgtcggcgctggccggggtgccgctggcgctcaaggacgtcttcaccaccagcgacatgcccaccacctgcgggtcaaaaatcctggagggatggcgatctccctacgacgccacgctgaccgcgcggttgcgcgccgcggggatcccgatcctgggcaagaccaacatggacgagttcgcgatgggctcgtcgacggagaactccgcttacggtcccacccgcaacccgtggaatctcgaccgggtacccggcggttccggtggcggcagcgcggcggcgctggccgcgttccaggcgccgctggccatcggatccgacaccggggggtcgatccgccagccggccgcgctgaccgcgaccgtcggcgtcaaacccacctacggcacggtgtcgcgctatgggctggtggcctgcgcgtcctcgctggatcagggcggcccgtgtgcgcgcaccgtcttggacaccgcgctgttgcatcaggtgatcgccggccacgacccgcgcgactccacgtcggtcgacgccgaggtgcccgacgtggtgggcgccgctagggccggcgcggtcggggatctgcgtggcgtgcgggtcggcgtggttcgacagctgcacggcggcgagggctaccagccgggcgtgctggcctccttcgaggctgccgtggagcagctaaccgcgctgggcgctgaggtcagcgaggtcgactgcccgcacttcgaccatgccctggccgcctattacctgattctgccctcggaggtgtcgagcaatctggcgcgcttcgacgcgatgcgctacgggctgcgggtcggcgacgacggcacccgcagcgccgaggaggtgatggcgatgacccgggccgccggtttcgggcccgaggtcaagcggcgcatcatgatcggcacctacgcgttgtcggccggctactacgacgcctattacaaccaggcgcagaaggtgcgcacgctgatcgcccgcgacctcgacgcggcgtatcggtccgtcgacgtgctggtgtcgcccacgaccccgaccaccgcgttccggatgggtgagaaggtggacgatccgctggcgatgtacttgttcgacctgtgcacgctgccgctgaacttggccggccactgcggcatgtctgtgccgtcggggctctccccggacgacgggttgccggttggcctacagatcatggcgccggcattggccgacgaccggctctaccgggtgggggcggcttatgaggccgcccgcggcccgctactgagcgccatttag

SEQ ID NO: 430 - DNA, 363 bp, Mycobacterium Tuberculosis
gtgtcgcagagtatgtacagctacccggcgatgacggccaatgtcggagacatggccggttatacgggcacgacgcagagcttgggggccgatatcgccagtgagcgcaccgcgccgtcgcgtgcttgccaaggtgatctcgggatgagtcatcaggactggcaggcccagtggaatcaggccatggaggctctcgcgcgggcctaccgtcggtgccggcgagcactacgccagatcggggtgctggaaaggccggtaggcgattcgtcagactgcggaacgattagggtggggtcgttccggggtcggtggctggacccgcgccatgcgggtccagccacggccgccgacgccggagactaa

SEQ ID NO: 431 - DNA, 291 bp, Mycobacterium Tuberculosis
atgtcgcagattatgtacaactatccggcgatgatggctcatgccggggacatggccggttatgcgggcacgctgcagagcttgggggccgatatcgccagtgagcaggccgtgctgtccagtgcttggcagggtgataccgggatcacgtatcagggctggcagacccagtggaaccaggccctagaggatctggtgcgggcctatcagtcgatgtctggcacccatgagtccaacaccatggcgatgttggctcgagatggggccgaagccgccaagtggggcggctag

SEQ ID NO: 432 - DNA, 1077 bp, Mycobacterium Tuberculosis
gtggttggtgcagccagtgcggatagcgcggcggcggccggtgagcatgaggccgcggcggctggctatgtttgtgcgttggcggagatgccgacgttgccggagttggcggccaaccacctcacgcatgcggtgttggtggcgacgaatttctttgggatcaacacgatcccgatcgcgctcaacgaggccgactatgtgcggatgtgggtccaggcggccaccgtgatgagcgcctatgaggcggtggtgggtgccgcgctggtggccacaccacacaccggcccggcaccggtcatcgtcaaacccggcgccaatgaagccagcaacgccgtggccgccgcaaccataaccccattcccattcggagaattagcgaagtttttggaaatggctgcccaagcatttacagaggtcggcgaattgataatgaagagcgccgaagcctgggctgtgggattcgtcgagctgatcacgggtctggtaaatttcgagccttggctcgtccttaccgggatgatcgatatgtttttcgccacggtaggttttgcgttaggcgtatttgttctggttccgctattagaattcgcggttgtcttggaactggcgatactcagtattggttggattatttcgaatatttttggcgctattccggttttgggggggccgttgttgggggcgttggccgctgctgtggttccgggtgtagctgggttggccggggtggcgggattggccgctctgccggcggtgggtgcggctgctggcgcgccggcggcgttggtgggcagtgtggcgccggtgtcgggtggtgtggtgtcgccgcaggcgcggttggtgtcggcggtggagccggctcccgcgagcacgtcggtgtcggtgctggcttctgatcggggtgctggggcgttggggtttgttgggacggctggcaaggagtcggttgggcagccggcggggttgacggtgttggccgatgagtttggtgatggtgcgccggtgccgatgctgccgggcagctgggggccggatttggtcggtgtggccggtgatggggggttggtgtcagtttga

SEQ ID NO: 433 - DNA, 1248 bp, Mycobacterium Tuberculosis
atgacctcttctcatcttatcgacgccgagcagcttctggctgaccaactcgcacaggcgagcccggatctgctgcgcgggctgctctcgacgttcatcgccgccttgatgggggctgaagccgacgccctgtgcggggcgggctaccgcgaacgcagcgatgagcggtccaatcagcgcaacggctaccgccaccgtgatttcgacacccgtgccgcaaccatcgacgtcgcgatccccaagctgcgccagggcagctatttcccggactggctgctgcagcgccgcaagcgagctgaacgcgcactgaccagcgtggtggcgacctgctacctgctgggagtatccactcgccggatggagcgcctggtcgaaacacttggtgtgacaaagctttccaagtcgcaagtgtcgatcatggccaaagagctcgacgaagccgtagaggcgtttcggacccgcccgctcgatgccggcccgtataccttcctcgccgccgacgccctggtgctcaaggtgcgcgaggcaggccgcgtcgtcggggtgcacaccttgatcgccaccggcgtcaacgccgagggctaccgagagatcctgggcatccaggtcacctccgccgaggacggggccggctggctggcgttcttccgcgacctggtcgcccgcggcctgtccggggtcgcgctggtcaccagcgacgcccacgccggcctggtggccgcgatcggcgccaccctgcccgcagcggcctggcagcgctgcagaacccactacgcagccaatctgatggcagccaccccgaagccctcctggccgtgggtgcgcaccctgctgcactccatctacgaccagcccgacgccgaatcagttgttgcccaatatgatcgggtactcgacgctctgaccgacaaactccccgcggtggccgagcacctcgacaccgcccgcaccgacctgctggcgttcaccgccttccccaagcagatctggcgccaaatctggtccaacaacccccaggaacgcctcaaccgagaggtacgacgccgaaccgacgtcgtgggcatcttccccgaccgcgcctcgatcatccgcctcgtcggagccgtcctcgccgaacaacacgacgaatggatcgaaggacggcgctacctgggcctcgaggtcctcacccgagcccgagcagcactgaccagcaccgaagaacccgccaagcagcaaaccaccaacaccccagcactgaccacctag

SEQ ID NO: 434 - DNA, 741 bp, Mycobacterium Tuberculosis
gtggtcagaatcccccgaccccaccccagtgcaaagccgggggtgaaagtcgacgcccgcagtgaacggtggcgtgagcaccgcaagaaggtgcgcaacgaaatcgtcgacgcggcgttccgcgctatcgaccggctgggccccgagctgagtgtgcgccaaatcgccgaagaggccggcaccgccaagcccaagatctatcggcatttcaccgacaagtccgatttgctcgaggctatcgggatgcgactgcgtgacatgctgtgggcggcgatcttcccgtcgctcgacttagccaccgactctgcccgcgaagttatccggcgcagcgtcgaggagtacgtcaacctcgtcgaccagcaccccaacgtgctgcgggtgttcattcagggccgctcggcaaagcagtccgaggcgacggtacgcaccctcaacgaaggccgggagatcacgctggccatggccgagatgttcaacaacgagctgcgcgagatggagctgaatcgagccgcgctcgaactcgccgcattcgcggcgttcggatcggccgcatcggcaaccgagtggtggttgggccccgaacccgacagcccgcgccgcatgccgcgtgagcagttcgtggcgcatctgaccaccatcatgatgggcgtgatcgtcggcaccgccgaagcgctgggcatcgcggtcgaccctgaccaaccgatccacgacgcggtacccaacaatcccgccgtgcgttga

SEQ ID NO: 435 - DNA, 2082 bp, Mycobacterium Tuberculosis
atgctgaacctgtacgacgcggacggcaagatccagttcgacaaggatcgggaagcagcccaccagtactttttgcagcatgtcaatcagaacacggtcttcttccataatcaggacgagaagctcgactacctgatccgcgagaattactacgagcgtgaggttctcgaccagtactcgcgcaacttcgtcaagacgctgctagaccgcgcctacgccaaaaagttccggtttccgacgtttttgggtgcgttcaagtactacacctcctacacgctgaaaacctttgacgggaagcgctatctggagcgcttcgaggaccgcgtggtcatggtggcgctaacgttggccgccggcgataccgcacttgccgagctgctggtcgacgagatcatcgacggccgcttccagcccgccacaccgacgtttttgaattctggcaagaagcagcgcggggagcccgtgagctgttttttgcttcgcgtcgaagacaacatggagtcgatcggacggtcgatcaactccgcgctgcagctatccaagcgtggcgggggagtggcgttgctgctgaccaacattcgcgagcacggcgcgccgatcaagaacatcgagaaccagtcctcgggcgtcatccccatcatgaagttgctggaggatgcgttctcctacgccaaccagctgggcgctcgtcaaggtgccggcgcggtgtacctgcacgcccatcaccccgacatctaccgattcctggacaccaagcgtgagaacgccgacgagaagatccggatcaagacgctgagtctgggggtggtgatccccgacatcaccttcgagttggccaagcgcaacgatgacatgtacctgttctcgccctacgatgtcgagcgggtctacggtgtgccgttcgctgacatctcggtcaccgagaagtactacgaaatggtcgatgacgcgcgcatccgcaagaccaagatcaaggcacgggagttcttccagacgctggccgagctgcagttcgagtccggctacccctatatcatgttcgaagacaccgtcaatcgcgctaatccaattgatggcaagatcacgcacagcaacctgtgctcggagatcctgcaagtgtctacgccgtcattgttcaacgaggacttgtcgtatgccaaagtgggcaaagacatttcgtgcaacctggggtcgctgaacatcgccaagacgatggactcgccggacttcgcgcagacgatcgaggtggcgatccgcgcgttgaccgcggtgagcgaccaaacccatatcaagtcggtgccctcaatcgagcagggcaacaacgactcccacgcgatcgggctaggacagatgaacctgcacggctacctggcccgggaacgcatcttctacggatccgacgaaggcatcgacttcaccaacatctacttctatacggtgctgtatcacgcgttgcgggcatccaaccgcatcgcgatcgaacgcggcacgcacttcaagggtttcgagcggtccaagtacgcgtccggggaattcttcgacaagtacaccgaccagatttgggagccgaagacccagaaggtacgccagctgttcgccgacgccggcatccgcatcccaacgcaggacgactggcgtcggctcaaggagtcggtgcaagcgcacggcatctacaaccagaacctgcaggcggtgccgccgaccgggtcgatttcctacatcaaccattcgacgtcgtcgattcacccgatcgtgtcgaaggtcgagatccgcaaggaaggcaagatcgggcgggtctactacccggcgccgtatatgaccaacgacaacctggagtactacgaagacgcctacgagatcggttacgagaagatcatcgacacctacgcggcggccacccagcatgtggatcaagggctttcgctgacgttgttcttcaaagacaccgccaccacccgcgacgtgaacaaggcgcagatttacgcctggcgcaaggggatcaagacgctgtactacatccggctgcggcagatggcgttggagggcaccgaggtcgagggttgcgtgtcctgcatgctgtag

SEQ ID NO: 436 - DNA, 1479 bp, Mycobacterium Tuberculosis
atggcgacgatccaccccccggcatacctccttgaccaagccaagcgtcgcttcacgccgtcgttcaacaactttcccggcatgagtcttgtcgaacacatgctgctgaacaccaaattcccggagaagaaactcgccgaaccgccgccaggcagcgggctcaagccggtcgtcggtgacgcggggctgccgatccttgggcacatgatcgagatgttgcgcggcggaccggactatctgatgttcctgtacaagacgaagggtccggtcgtattcggcgactcagctgtgctgccgggtgtcgcagcactgggccctgacgcggcgcaggtcatctactccaaccgcaacaaggactactcgcagcagggctgggtgcccgtgatcgggcccttcttccaccgcggcctgatgctgctcgacttcgaagagcacatgttccaccgacggatcatgcaggaggcgttcgtccggtccaggctcgccggctacctcgagcagatggacagggtcgtctcgcgggtggtcgccgacgactgggtcgtcaacgacgcacgcttccttgtctatccggccatgaaggcgctcacgcttgacatcgcctcgatggtcttcatgggccacgaacccggcaccgatcacgaactggtcaccaaggtgaacaaggcgttcacgattaccacccgtgccggcaacgcggtgatccgcaccagcgtgccaccgttcacctggtggcgaggactgcgagcacgcgagctgctggaaaactacttcaccgcccgagtcaaagagcgccgcgaagcgtcgggcaacgacctgctgacggtgttgtgccagaccgaagacgacgacggcaaccggttctccgacgccgacatcgtcaaccacatgatcttcttgatgatggccgcccacgatacctcgacgtcaacggccacgacgatggcctaccagctggccgcccacccggaatggcagcagcgctgccgcgacgaatcggaccggcatggcgatgggccgctcgacatcgaatccctagagcagctggaatcgctcgacctggtgatgaacgagtcgatccggttggtgacgccggtccagtgggcgatgcggcagacggtgcgcgataccgaactgctgggctactacctacccaagggcaccaacgtgatcgcatacccagggatgaatcatcgcctgccggaaatctggacagacccgctgacattcgacccggaacggtttaccgagccgcgcaacgagcacaagcggcaccgctatgcgttcacgccgttcggcggcggcgtgcacaagtgcatcgggatggtgttcgaccaattggagataaagacgatcctgcaccggctgctgcgccgctaccggctggagctgtcccgtcccgactaccagccccgctgggactacagtgccatgccgatcccgatggacgggatgccgatcgtgctgcgtcccaggtag

SEQ ID NO: 437 - DNA, 2166 bp, Mycobacterium Tuberculosis
atgggtattgcattgaccgacgaccatcgcgagctctccggggtggctcgcgcgttcttgacttcgcagaaggtgcgctgggcggcgcgtgcatcactggacgcggcgggggacgcccgcccgccgttctggcagaacctcgccgagctgggctggctcggcctgcatatcgacgagcgacacggtggctctggctatggcctgtccgagcttgtggtggtgatcgaagagctcggtcgtgcggtggcaccggggctgtttgtgccgaccgtgatcgcctcagcggtggtcgccaaagaaggtactgatgaccaacgggcacggctgttgccggcgctgattgacggaaccctgacggcgggtgtgggactggatagtcaggtgcaggttaccgacggtgttgccgacggtgaggcgggaatcgtgttgggcgccgggcttgccgagctgctgttggttgccgccggtgacgacgtgctggtgttggaacgcggccgcaagggcgtctcggttgatgtgccggaaaactttgatccgacccggcggagtggccgcgtgcgcctggacaacgtgcgcgtcacgaccgacgacatcctgcttggtgcgtatgaatcggctttggcccgcgcgcgcacattgctggccgccgaggccgtcggtggggcggccgactgcgtggacagcgccgtggcctatgccaaggtgcgacagcaattcggccgtaccatcgccacgtttcaagcggtgaagcatcactgcgcgaacatgctggtggccgccgagtcggcgatcgccgcggtctgggatgccgcgcgtgcggcagcagaggatgaggagcagtttcggctggccgccgcggtcgctgcggccctggcgtttccggcctatgcacgcaatgccgagctcaacatccaggtgcacggcggtattggctttacctgggagcatgacgcgcatctgcatctgcgccgggcgttggtgaccgtgggattgttcggcggtgatgcgcccgtccgagacgttttcgagcgcaccgcggctggcgttacccgggcgatcagcttggacctgccggcacaggccgaggagctgcgcgcccgcatccgttcggacgccgctgaaatcgctgctctggaaaaggatgcacagcgcgacaagctgatcgagacgggctatgtgatgccgcattggcccaggccgtggggtcgtgccgcgggcgcggtggagcagttggtgatcgaggaagagttcagcgcggcgggcatcgagcgcccggattactcgatcaccgggtgggtgatcttgacgctgattcagcacggaacgccttggcagattgaaagattcgtcgagaaagcgctgcgccagcaggagatatggtgccaactgttctccgaacctgacgcggggtctgacgcggcctcggtcaagacccgcgcaactcgggtggagggcggctggaagatcaacgggcaaaaggtgtggaccagcggagcgcagtactgcgcgcgtggcctggctaccgtgcgtaccgatccggatgcccccaaacacgctggcatcaccacggtgatcatcgacatgttggcccccggtgtcgaggtgcggccgctgcggcagatcaccggcgactcggaattcaacgaggtgttcttcaacgatgtcttcgtccccgatgaggacgttgtcggggcgccgaactccgggtggacggtggcgcgggcaacgctgggcaacgagcgggtcagcatcggcggcagtggctcgtactacgaagcaatggcggcgaagctggtgcaattggtccagcggcggtcagatgcgtttgcgggcgccccaattcgagtcggcgctttcctcgcagaggatcacgcactgcggctgctgaacctgcgccgtgccgctcgcagcgtcgaaggagccggccctggtccggagggcaacatcaccaagctcaaagtggcagagcacatgatcgagggcgccgccatcgcggccgcgctatgggggcccgagattgcgttgctggacggccccggcagggtgattggccgaacggtgatgggcgcccgtggcatggcgatcgccggcggcacgtcggaggtgacccgcaatcagattgccgagcggatcctgggcatgccgcgtgatcccctgattagctag

SEQ ID NO: 438 - DNA, 477 bp, Mycobacterium Tuberculosis
atggtgttggatggcgtggtgtccgacactcgccgcagccggacgatagcggcccggcagcaaaccatctgggacgtcctggccgactttggttccttgagttcatgggtcgagggcgtcgaccactcctgcgtcttgaaccacggtcccgacggcggagctctaggcagcacccgccgcgtgcaggtcggccgcaacacgctggtggagcgtgtcatcgagttcgacccacccacgacactggcctaccgcatcgagggcctgcccgcccggctgcgcaaagtcaccaaccgctggacactacggccggccgatcctgtaggcgcggtgacggtggtcaccttgaccagcacgatcgaaatcggcggcaacccgctggcgcgtctggccgaacttgtcgtcggccgcgccatggccaagcggtccaacacgatgctcgccgggctggcacaacgattggaggacaaacatggctaa

SEQ ID NO: 439 - DNA, 3333 bp, Mycobacterium Tuberculosis
atgaccgacgttgatccgcacgcgacgcggcgggacctggtcccgaatattcccgcggaactgcttgaggctggattcgacaatgtcgaggagatcgggcgcggcggattcggcgtcgtctaccgctgcgtccagccctcgctggaccgcgccgtcgccgtcaaggtattgagcaccgacctggatcgggacaatctcgagcgcttcctgcgcgagcagcgggccatgggccgcctttccgggcacccgcacatcgtgaccgtcttgcaggtgggcgtgttggcgggtgggcggcccttcatcgtgatgccctaccacgccaagaattcgttggagacgctgattcgccggcacgggccgctggactggcgcgagacgctgtcgatcggcgtcaagctcgcgggagcgctggaagccgcgcatcgcgtcggcaccctgcaccgtgacgtgaagccggggaatatcctgctgaccgactacggggaaccgcagctgaccgatttcggaatcgccagaatcgccgggggtttcgagacggcgaccggggtgattgccggttccccggctttcaccgcgccggaagttctcgaaggagcatcgccgacgcccgcctctgacgtgtactccctgggcgcgacgttgttctgtgcgctgaccggccatgccgcctacgagcgccgcagcggtgagcgggtgatcgcccagttcctgcggatcacctcgcagccgatccccgacctgcggaagcagggactgcccgcggacgtggccgccgccatcgaacgggcgatggcccgccatccggcggatcgtcccgcgaccgcggcagacgttggcgaggagcttcgcgacgttcagcgccgcaacggcgtcagcgtcgacgagatgcccctccccgtcgagctgggcgtggaacgccgacgctcgcccgaggcgcacgcggcgcatcggcataccggcggcggcaccccgacggtcccgacgcctccgacacccgcgaccaagtaccggccgtcggtgcccaccggctcgctggtcacccgcagccggctcaccgacatcctgcgcgccggcggacggcgccggctgatcctcatccacgcgccctcgggattcggcaaaagcaccctggcggcgcaatggcgggaagagctctcgcgcgacggcgccgcggtcgcctggctgacaatcgacaacgacgacaacaacgaggtgtggttcttgtcgcacctgctcgagtcgatccggcgggtccggcccacgctggccgagtcgttggggcacgtgctcgaagagcatggggatgacgccggccgctacgtgttgacttcgctgatcgacgaaatccacgaaaacgacgaccggatcgcggtggtgatcgacgactggcatcgggtgtccgacagccgcacccaagctgccctgggtttcctgctggacaacggatgtcaccacctgcagctcatcgtgaccagctggtctcgcgccggtttgccggtgggcaggttgcggatcggcgacgaactagccgagatcgattcggctgctttgcgcttcgataccgacgaggccgccgcgctgctgaacgatgctggtggtctgcgattgccgcgcgcagacgtgcaggcgctgactacctctaccgacgggtgggccgcggcgctgcggctggccgcgctgtcgctgcgcggcgggggcgacgcgacccaactcctgcgcggactttccggcgccagtgacgtgatccacgaattcctgagcgaaaacgtgctggacaccctggaacccgaactgcgcgaattcctactggtggcatcggtcaccgaacgcacgtgcggcgggctggcctcggcgctggccgggatcaccaatgggcgggcgatgctggaagaggccgagcaccgcggcttgttcctgcaacggaccgaagacgacccgaattggtttcgcttccaccaaatgttcgccgactttctccaccgtcgcctcgaacgtggcgggtcgcaccgggtggcggaactgcaccgcagggcatcggcctggttcgccgagaacggctacctgcacgaagccgtcgaccatgcactggccgcgggcgatcccgcgcgcgccgtcgatcttgtcgagcaggatgaaacgaacctgccggagcagtcaaagatgaccacacttctggcaatcgtgcagaaactgccgacgtcgatggtggtttcacgggcccggctccaactcgccatcgcgtgggcgaacattctgctgcaacggccggcgccggccaccggtgccctgaatcgtttcgaaacggcccttggccgggccgagcttcccgaggcgacgcaggcggatctgcgggccgaggcagacgtgttgcgggcggtcgccgaggtgttcgcagaccgggtcgagcgcgtggatgaccttctcgccgaggcaatgtcgagaccggacaccctgcccccgcgagtccccgggaccgccggcaacaccgcggcgttggccgcgatctgccgcttcgagttcgccgaggtatatccactgctggactgggccgcgccctaccaggaaatgatgggaccgttcggcaccgtttatgcgcagtgcttgcgcggcatggcggccaggaatcggctcgacattgtcgctgcgctacagaacttccgaacggcgttcgaggtcggcacggcagtgggggcccactcgcacgcggcgcggcttgcgggttcgctgctcgccgaattgctctacgagaccggcgatctggccggggctggtcgtctcatggacgagagctatctgctgggttccgaggggggtgcagtggactacctggccgccaggtacgtgatcggcgcgcgggtcaaggcggcccagggggatcatgagggtgcggctgatcgcctgtccaccggaggcgatactgccgtccagctggggctgccgcgcctggctgcccgaatcaacaacgagcggatccggctgggcatcgcgctacctgcggcggtggccgccgatttgctggcaccccgcaccatcccccgcgacaatggaatcgccaccatgacagccgaactcgacgaggactccgcggtgcgcctgttgtccgccggcgactccgccgatcgtgaccaagcctgccaacgggccggtgctctcgccgccgccatcgacggtacgcgcagaccgctggcggcgctgcaggcgcaaatacttcatatcgaaacgcttgccgccaccggacgggaatccgatgcgcgaaacgaactggcgccggtagccacgaagtgcgccgaactcgggctgtcacgtctgctggtcgatgcgggactggcctaa

SEQ ID NO: 440 - DNA, 1107 bp, Mycobacterium Tuberculosis
atgaaaaccaccgcggcggtactgttcgaggcgggcaaaccgttcgagctgatggagctcgatctcgacgggccgggtccgggcgaggtgttggtcaaatacaccgccgccgggctgtgccattccgacctgcacctcaccgatggtgatttaccaccgcggttcccgatcgtgggcggccacgaagggtccggggtcatcgaggaggtgggtgccggcgtcaccagggtcaagcccggagaccacgtggtgtgcagcttcatcccgaactgcgggacttgccgctactgctgcaccggccggcagaacctgtgcgacatgggggccaccatcctggagggctgcatgccggacggcagtttccgattccattcccagggaacagatttcggcgccatgtgcatgctgggcacgttcgccgagcgggccaccgtctcgcagcattcggtggtgaaggtggacgactggctgccactggaaaccgcggtgctggtgggctgcggcgtgccgtccggttggggcaccgcggtcaatgccggaaacctgcgggccggcgacaccgccgtcatctacggcgtcggcggcctgggcatcaacgcggtccagggcgcgaccgccgccggctgtaagtacgtcgtggtggtggacccggtggctttcaagcgcgagaccgcgctcaagttcggcgccacccatgccttcgccgacgccgccagcgcggcggccaaggtcgacgaactcacctgggggcagggcgccgacgcggcgctgatcctggtgggcaccgtcgacgacgaggtggtctcggccgcgaccgcggtgatcggcaagggcggcaccgtcgtcatcaccgggctggcggacccggccaaactcaccgtgcacgtctccggaaccgatttgacgctgcacgagaaaacgatcaagggctcgctgttcggttcctgcaatccgcaatacgacatcgtgcggctgctgcgcctctacgacgccggccagctgatgctggacgaactcgtgaccaccacctacaacctcgaacaggtgaaccagggctaccaggatctgcgggacggcaagaacattcggggcgtgatcgtgcactga

SEQ ID NO: 441 - DNA, 483 bp, Mycobacterium Tuberculosis
gtgtccaagtcgtcgcgtggcggccggcagatcgttgccagcaatcgcaaagcccggcacaactattcgatcatcgaggtgttcgaggccggggttgcgctgcaaggcacggaggtgaagagcctgcgggaagggcaggcgtcgctggccgattcgttcgccaccatcgacgacggcgaagtgtggctgcgcaacgcgcacatcccggaataccggcacggcagctggaccaaccacgagccgcgacgcaaccgcaaactgctgttgcatcgccgccagatcgacaccttggtcggcaagatccgcgaaggcaacttcgccctggtgccgttgtcgctgtatttcgccgaaggcaaggtcaaggttgagcttgcgctggcccgaggcaagcaagcccgcgacaaacgccaggacatggcccgtcgtgatgcccagcgtgaagtgctccgcgagttgggtcggcgcgctaagggcatgacctga

SEQ ID NO: 442 - DNA, 1137 bp, Mycobacterium Tuberculosis
atgccggtaaccttggctgctgtggaccccgaccgtcaagccgacatcgccgccttggactgcaccctgaccacggtggagcgggtgctcgacgtcgagggtctgcgcagccgcatcgagaagctcgagcatgaggcatctgatccgcacttgtgggacgaccagacccgggcgcagcgggtgaccagcgagttgtcgcacacccagggagagctgcggcgcgtcgaggagctaaggcgccgcctggacgacctgccggtgctctacgagctggccgccgaggaagcgggcgcggccgccgccgatgccgtcgccgaggccgacgcggagctcaagtcgttgcgcgccgacatcgaggccaccgaggtgcgcaccctgctgtcgggggaatacgacgagcgtgaggcgctggtcaccatccggtccggcgcgggtggggtggacgccgcagactgggccgagatgctgatgcggatgtatatccgctgggccgagcagcacaaataccccgtcgaggtgttcgacacctcctatgccgaagaagccggcatcaaaagcgccacgttcgccgtgcacgcaccgttcgcctacggcacgttgtcggtcgaacagggcacccaccggctggtgcggatcagcccgttcgacaaccagagccggcgacagacgtcgttcgccgaagtcgaagtgctgccggtggtggagaccaccgaccacattgacatccccgagggcgatgtccgcgtcgacgtctatcgctccagcgggcccggcgggcaatcggtgaacacgacagactcagcggtgcggctcacccacattcccagcggtatcgtggtcacctgccagaacgagaagtcccaactgcagaacaagatcgcggcgatgcgggttctgcaagcaaagttgttggaacgcaagcgcttagaagaacgcgccgagctcgacgcgttgaaggccgacggcggcagctcctggggtaaccagatgcgttcctatgtgctgcacccatatcagatggtcaaggatctgcgcaccgagtacgaggtcggcaatccggcggccgttctggatggagacctcgacggattcctggaagccgggatccggtggcgcaatcgacgtaatgacgactag

SEQ ID NO: 443 - DNA, 1248 bp, Mycobacterium Tuberculosis; identical to SEQ ID NO: 433

SEQ ID NO: 444 - DNA, 303 bp, Mycobacterium Tuberculosis
atgtgctctggacccaagcaaggactgacattgccggccagcgtcgacctggaaaaagaaacggtgatcaccggccgcgtagtggacggtgacggccaggccgtgggcggcgcgttcgtgcggctgctggactcctccgacgagttcaccgcggaggtcgtcgcgtcggccaccggcgatttccggttcttcgccgcgcccggatcctggacgctgcgcgcgctgtcggcggccggcaacggcgacgcggtggtgcagccctcgggcgcgggcatccacgaggtagacgtcaagatcacctga

SEQ ID NO: 445 - DNA, 495 bp, Mycobacterium Tuberculosis
ttgcgctcgcggtcggtgcgctgggatcctcggtgccgacctggtcgcagtggagttggcgatccgcactgcgatgacccggctgggctcctcgctgctggagcagctgctgggcgccgacaccgggcaccggggccagcgcatcgattgcgggcaagggcattgcgcgtggttcgtcggttaccgcgacaagaacctcgataccgtgctggaccgggtccggttgctccgcgcctgctaccactgccgcacctgcgggcgtgggatggcgccccctggatctggaacctggccaccgcgatcctgcccgaagccaccccgatcgtggacctctaccacgctcgccagcacgtccacgacctcgccggccagctcgcacccgccctcggcgaacaccacagtgactggctgaccgcccggctggtcgacctcgactccggcgacatcgaaacgctggttcaacaaccgatcgggcagcacaccggtcacacgtaa

SEQ ID NO: 446 - DNA, 1035 bp, Mycobacterium Tuberculosis
gtgctcaagaacgcagtcttgctggcatgccgggcgccgtcggtgcacaacagccagccctggcgttgggtggccgaaagcggctccgagcacactactgtgcacctgttcgtcaaccgccaccgaacggtgccggccaccgaccattccggccggcaagcgatcatcagttgcggtgccgtactcgatcaccttcgcatcgccatgacggccgcgcactggcaggcgaatatcactcgctttccccagccgaaccaacctgaccagttggccaccgtcgaattcagtcccatcgatcacgtcacggcgggacagcgaaaccgcgcccaggcgattctgcagcgccgaaccgatcggcttccgtttgacagcccgatgtactggcacctgtttgagcccgcgctgcgcgacgccgtcgacaaagacgttgcgatgcttgatgtggtatccgacgaccagcgaacacgactggtggtagcgtcacaactcagcgaagtcctgcggcgggacgatccgtactatcacgccgaactcgaatggtggacttcaccgttcgtgctggcccatggtgtgccgccggatacgctggcatcagacgccgaacgcttgcgggttgacctgggccgtgacttcccggtccggagctaccagaatcgccgtgccgagctagctgatgaccgatcgaaagtccttgtgctgtcgacccctagcgacacgcgagccgacgcactgaggtgtggcgaagtgctgtcgaccatcctactcgagtgcaccatggccggcatggctacctgcacgttgacccatctgatcgaatccagtgacagtcgtgacatcgtgcggggcctgacgaggcagcgaggcgagccgcaagccttgatccgggtagggatagccccgccgttggcagcagttcccgcccccacaccacggcggccgctggacagcgtcttgcagattcgccagacgcccgagaaagggcgtaatgcctcagatagaaatgcccgtgaaacgggttggttcagcccgccttga

SEQ ID NO: 447 - DNA, 333 bp, Mycobacterium Tuberculosis
gtggtgcaaggccgcaccgtgctgtttcgtaccgcggagggcgccaaattattttcagccgtcgcgaagtgcgcggtggctttcgaggcggacgaccacaacgttgccgagggctggagcgtgatcgtcaaggttcgcgcccaggtgctgacgaccgacgcgggggtccgcgaagccgaacgcgcccagttactaccgtggaccgcgacgctgaaacgtcactgtgtgcgggtgatcccgtgggagatcaccggccgccacttcaggttcggtccggaaccggaccgcagccagacctttgcctgcgaggcctcgtcacacaaccagcgatag

SEQ ID NO: 448 - DNA, 807 bp, Mycobacterium Tuberculosis
atgagcgatcctcggccagctcgggcagtggtcgttggtatcgacgggtcaagggcggcaacgcatgcggcgttgtgggcggtcgatgaggcggtgaaccgagacattccgctgcgactggtgtacgtcatcgatccgtcccaactgtccgccgccggcgagggcggtgggcaatcagcggcccgagcggcgctgcacgacgcctctcggaaggtcgaggccaccgggcaaccggtcaagatcgaaacggaggttctgtgcggcaggccgctcaccaagctgatgcaggagtccaggtccgcggcgatgctgtgcgtcggttcggtggggcttgatcatgtccgcggtcgccggggttcggtcgcggcgaccctggctgggtcggccttatgccccgtggcggtgattcacccgtcgccggccgagccagcgacaacctcccaggtcagcgcggttgtcgcggaggtggacaatggtgtggtgctgcggcacgcattcgaggaggccaggctgcgcggagttccgctgcgggccgtggctgtccacgctgctgaaacacccgatgacgtcgaacagggcagccggttggcgcatgtacacctgagccgtcggctcgcccactggacccggctctaccccgaggtgcgggtggatcgggccatcgccggcggcagtgcgtgccgtcatctggccgccaacgcaaagccgggtcagctgttcgtcgcggactcacactccgcgcacgaattgtgcggtgcataccagcccggatgcgccgtacttacggtacgcagtgccaacttgtag

SEQ ID NO: 449 - DNA, 1206 bp, Mycobacterium Tuberculosis
atggcaataaatctggaactgccgcgcaagctgcaggcgatcatcgtcaagacccatcagggcgctgcggagatgatgcggccgatagcccgcaagtacgacctgaaggaacatgcctacccggtcgaactcgacaccctgatcaatttgttcgagggcgccgccgaatcgttcaactttgccggagcccattcgcttcgcgacgaggacgaaggcaaggacgaaaaccacaacggtgccaacatggccgccgtggtacagacgatggaggccagctggggcgacgtcgcgatgatgctgtcgctgccctatcaggggctgggtaacgcagccatctccgcggtagccaccgacgagcagctggagcggctgggcaaagtgtgggcagcgatggccatcaccgaaccggaattcggatcggactcggcggcagtgtcgacgaccgccaccctcgacggcgacgagtacgtgatcaacggcgagaagatctttgtcaccgccggttcccgcgccacccacatcgtggtctgggccacgctggacaaatccttgggccgcccggcgattaagtcgttcatcgtgccccgtgagcatcccggcgtgaccgtcgaacgacttgaacacaaactcggcatcaagggttctgatactgcggtgatccggttcgacaacgcccgtatccccaagggcaacctacttgggaacccggaaatcgaggtcggcaagggctttgccggggtgatggagaccttcgacaacacccggccgattgtggccgccatggccgtcgggatcggccgtgccgcactggaggaaatccgtagtgtcctcaccggggccggcgtggagatctcctacgacaagccctcacacacccagagcgccgcggccgccgagttcctgcggatggaggccgactgggaggccagctacctactgtccctgcgcgcagcctggcaggccgacaacaacatccccaactccaaagaagcctcgatgagcaaggccaaggcgggccggatggccagcgacgtcacctgcaaaaccgtcgaattggcaggaactaccgggtattccgagcaatcactgctggagaagtgggcccgcgactccaagatcctggacatcttcgagggcacccagcagatccagcagctggtggtcgcacgccgactgttgggcctgtcgtcgtccgagctcaaatag

SEQ ID NO: 450 - DNA, 972 bp, Mycobacterium Tuberculosis
atgcgcgcggtacgggtgactcggctggagggaccagatgcggtcgaggtggccgaggtcgaggaacccacgagcgccggtgtggtcatcgaggtgcacgctgccggcgtggccttcccggacgcactgctaacccgtggccgttaccagtaccgcccggagccgccattcgtgctcggcgccgagatcgccggagtggttcgatcggcgccggataacagccaagtgcgttccggagacagggttgtcggcctcacgatgctcaccggcggcatggccgaagtcgcggtattgtcgcccgagcgcgtgttcaagctgccggacaacatgactttcgaggcgggcgcgggcgtgctgttcaacgacctgacggtgtacttcgcgctggcggtccggggccggctgcaggccggtgagacggtgctggtgcacggggcggcaggcgggatcggcacatcgacgttgcgactagcgccggcgctcggggcgtctcgcaccgtcgcggtggtcagcacgcaggagaaggccgagcttgcgacagtggccggggcgacagatgtggtgttggccgaggggttcaaggacgcggtacaggagctgacgaacggccgtggtgtcgacatcgtcgtagacccggtcggcggcgaccggttcaccgattcgctgcgctcgcttgctgcgggaggacggctgttggtcatcggcttcactggcggcgagattcccaccgtgaaggtaaaccgccttctgctcaacaacattgacgttgtcggggtaggctggggcgcctggtcgctgacccaccccgatgcgctggcccagcagtggtcacaactcgagcggctgctacgctcgggcaagctgcctcctcccgaaccagtggtctacccactggaccaagccgctgcggcgattgcatcgctggagaatcgcaccgccaaggggaaggtcgtactacgcgtgcgcgactaa

SEQ ID NO: 451 - DNA, 387 bp, Mycobacterium Tuberculosis
ttgaacgtctacatacccatcctggtactggcggcgctggccgccgccttcgccgtggtgtcggtggtgatcgcgagcctggtcggcccgtcgcggttcaaccggtcaaagcaggccgcctacgaatgcgggatcgagcccgctagcactggagccagaacctccattggccccggcgcggcgagcgggcagcggttccccatcaagtactacctgaccgcgatgttgttcatcgtcttcgacatcgaaattgtgttcctctacccgtgggcggtcagctacgactcgctgggcacgttcgcgctggtcgagatggcgatattcatgctcacggtgttcgtggcctacgcgtatgtgtggcgccgcgggggcctgacgtgggattga

SEQ ID NO: 452 - DNA, 438 bp, Mycobacterium Tuberculosis
atgacctcgtttgcgcacccgggtactcgtgggctctccacggtgttcggactgatgatggtggggtcggccgctgtgggatcgcacgggctggctgttgtcgtggggcttgccgcggtgattgcggtaggggtggcggcggtgtttcgcctggcggcaacgcttgccgtggtgttgtcggtggtgatgatcgtggtgtccggcccgacgcatgtgcttgccgcattgtcggggttttgcgccgccgtctacctggtgtgccgatacggggccggtgttgtcgccgggagctggccgacgaccgttgccgccgttggtttcacgttcgctgggttggctgcgacgtcgttcccgctgcaagtgccatggctgccgttggcggcaccgttggccgtgttggctacctacgtgctggccacccgtccgttctcgaggtga

SEQ ID NO: 453 - DNA, 1272 bp, Mycobacterium Tuberculosis
gtgatccaaacgtgtgaagtcgagttgcgctggcgtgcatcacaactgacgctggcgattgccacctgtgccggagttgcgctagccgcagcggtcgtcgctggtcgttggcagctgattgcgttcgcggcgccgctgctcggcgtgttgtgctcgatcagctggcagcgtccggtcccggtgatccaggtgcacggtgacccggattcgcagcgatgtttcgagaacgaacatgtgcgagtgaccgtgtgggtcacaacggaatccgtggacgccgcggtcgaactcacggtatcggcgttggcgggaatgcagttcgaagctctggaatccgtgtcacgccggacgacaacggtttccgcggtggcgcaacgctgggggcgctatcctatccgggcccgggtcgccgtcgtcgcacgcggtgggttgttgatgggagccggaaccgtcgacgccgccgaaatcgtcgtgtttccgctgacaccgccgcagtcgacgccactgccgcagaccgaattgctcgaccgcctgggagctcatctcacccggcacgtcgggccgggtgtcgaatacgccgacattcgcccatatgtcccgggcgaccagctacgtgccgtgaactgggtggtaagcgcgcgccgtggccgactgcacgtgacaaggcggttgaccgaccgggccgctgacgtggtggtgttgatcgacatgtatcgacagccggcgggtccggcgaccgaggccaccgaacgagtcgtgcggggtgctgctcaggtggtgcaaaccgcgctgcgaaacggtgaccgtgctgggatcgttgcgctgggcggcaatcggccgcgatggctgggcgccgacatcgggcagcgccagttctatcgggtgctcgacaccgtgctcggcgccggggaagggttcgaaaacaccaccgggacgctggctccgcgcgcagctgttcccgcaggagcggttgtcattgcgttttccacgctgctggataccgagttcgcgctggcgttgatcgacctgcgtaaacgcggccacgtcgtggttgctgtcgacgttcttgatagctgtccgctccaggaccaactggatcccctggtggtccggatgtgggcgctgcagcgctccgcgatgtatcgcgacatggccaccatcggggtcgacgtgctgtcctggccggcggatcactcgcttcagcagtcgatgggtgcgttgcccaatcgccgtcgtcgcggacggggcagagctagccgggcgaggctgccatga

SEQ ID NO: 454 - DNA, 330 bp, Mycobacterium Tuberculosis
atgaccatggcccgcaactggcgtgacattcgcgccgatgccgtcgcgcagggccgcgtggatctgcagcgggccgccgtggcacgcgaggagatgcgcgatgccgtcctggcgcaccgcctggccgagatccgcaaggcgctaggccacgcacgtcaggccgacgtcgcggcgctgatgggggtctctcaggcccgtgtctccaagctggagagcggcgacctgtcccacaccgaactcggcaccctgcaggcctacgttgccgccctgggcgggcacctgcgcatcgtcgctgagttcggcgaaaatactgtcgagctgaccgcctga

SEQ ID NO: 455 - DNA, 189 bp, Mycobacterium Tuberculosis
gtgcgacgctcggcgtcgacctgtgggtggaagacgccaacccgccggggtacctcccggcctagcgacagcaaaaccctgatcctcgagttgcccgacgagcgggccgtcgcgatcgtgccggtgccgtcgaagttgtcgctgaaggcggccggcggccctaggggtgcccaaagcggccatggctaa

SEQ ID NO: 456 - DNA, 843 bp, Mycobacterium Tuberculosis
atgtcgccaagagttccccggctgcgttgggatgatcccttccgtgccttggacatgctggcctcgctgtggtcgtcgaccgggatgtcgctggtcagcgcgggagccgcccaggcagttgcggcgccctaccggacgttgttcaccaccttgcagcagctgctcatcggcaaggaagtcacggttcggattggggaccatgacgtggtgctgaccgtcaccgagctggactcggcactggaaccgcaggggctggccgtcggccagctgggcgaggttcgggtggccgctcgcggcatcagctgggatcagcatcatttgcacagcgccgttgccgtcctgcgcaacgtgcacatccgcccgggtgtgccgccgctggtgatcgccgctcccgtcgagttgtcgtccgccctgccgaccgagattttcgatgatgtgctccgtcaagcgacgccgcagctgcgcggtgagttgtccgagagcggagcggcccggctgcgctgggcgcgccggcccgactggggaggtcttgaggtcgacgtcgacgtggcgggcacaacctcccagacgacactgtggctgcgaccgcgcaccgtgatcaccggacaacggcggtggacactgccggcacggacaccggcctaccgagttccactgcctgagctgccgcatgggctgcgcatcaccgacgtcagcctcgcagccgattgtttgcagctctctgcgttgcttccggagtggcgaacggagctgccgctgcgttatctggaaagcgtgattacccaattgagtcagggtgcgctcagctttgtctggccgccgctgcgcagcggcgccgattga

SEQ ID NO: 457 - DNA, 687 bp, Mycobacterium Tuberculosis
atggacaccatgaggcaaaggattttggtcgttgacgacgacgcttcgttggctgagatgctcaccatcgtgctgcggggggaaggcttcgacaccgcggtcatcggcgacggtactcaggctctgaccgcggtgcgcgagctgcgccccgatctggtgttattggatttgatgctgcccggtatgaacggcatcgacgtgtgccgggtgttgcgcgccgattccggtgttccgatcgtgatgctcaccgcaaagaccgacaccgtggatgtggtgctgggtctggagtcgggcgccgacgactacatcatgaagccgttcaagcccaaggagctggttgcgcgggtgcgggcgcggctgcgccgcaacgacgacgaacccgccgagatgctgtccatcgccgacgtagaaatcgacgtaccggcgcacaaggtcactcgcaacggtgagcagatctcgttgacaccgctggaattcgacctgttggtcgcattggcgcgcaagccgcgccaggtgtttactcgtgatgtgctgctcgaacaggtatggggttaccggcacccagccgataccaggctggtgaacgtgcatgtccagcgtctgcgggccaaggtcgaaaaggatcccgagaacccgactgtggtgctgaccgttcgaggagtggggtacaaggccggacctccgtga

SEQ ID NO: 458 - DNA, 1488 bp, Mycobacterium Tuberculosis
atgaccggaaatttggtgaccaaaaattcgctgacccctgacgttcgtaacggcatcgactttaagatcgccgacctgtcactagcggatttcggccgcaaagaactccggatcgccgagcacgagatgcccggcctgatgtcgctgcggcgcgagtatgccgaggtgcaacccctgaagggggcccggatctcgggttcgctgcacatgacggtgcagaccgcggtgttgatcgaaaccctcaccgcgctgggcgccgaagtccgctgggcctcgtgcaacatcttctccacccaggatcacgccgccgccgccgtcgtggtcggcccgcacggcacccccgacgagcccaagggtgtcccggtgttcgcgtggaagggcgagacgctcgaagagtactggtgggccgccgagcagatgctcacctggccggaccccgacaagccggccaacatgatcctcgatgacggcggtgacgccaccatgttggtgctgcgcggcatgcagtatgagaaggccggcgtggtgccgcccgccgaggaggacgaccccgccgagtggaaggtcttcctgaacctgctacggacccgcttcgagaccgacaaggacaagtggaccaagatagccgagtcggtcaagggcgtcaccgaggagaccaccaccggcgtgctgcggctctaccaattcgccgcggccggggatctggccttcccggcgatcaacgtcaacgactcggtgaccaagtccaaattcgacaacaagtacggcactcggcactccctgatcgacggcatcaaccgcggcaccgacgcgctgatcggcggtaagaaggtcctcatctgcggctacggcgacgtcggtaagggctgtgcggaggcgatgaagggccagggagcgcgggtctccgtcaccgagatcgacccgatcaacgcgctgcaggccatgatggagggcttcgacgtggtcaccgtcgaggaggccatcggggacgccgacatcgtcgtaaccgcgaccggcaacaaagacatcatcatgctcgagcacattaaggcgatgaaggaccacgcgatcctgggaaatatcggccacttcgacaacgagatcgacatggccgggctggagcgctccggggcgacacgggtcaacgtcaagcctcaggtcgacctgtggacctttggcgacacgggccgctcgatcatcgtgctgtccgaggggcggctgctgaacctgggcaatgccaccgggcacccctcgttcgtgatgagcaacagcttcgctaaccagacgatcgcccagatcgagctgtggaccaagaacgacgagtacgacaacgaggtgtaccggctgcccaagcacctcgacgagaaggtggctcgaatccatgtcgaggcccttggcggtcacctgaccaagctgaccaaggagcaggccgaatacctcggcgtcgacgtcgagggtccctacaagccggaccactaccgctactga

SEQ ID NO: 459 - DNA, 636 bp, Mycobacterium Tuberculosis
gtgagcactccaagcgctactgtcgcgcctgtgaagcggataccctatgccgaggcctcgcgggccctgttgcgggattcggtgctggatgcgatgcgggatctgctgctgacccgcgactggtccgccatcacgctgtccgacgtggcccgcgcggcgggcatcagccggcagaccatctacaacgaattcggttcccggcaaggcctggcgcagggatacgcgctgcgcctggccgaccgattagtggacaacgtccatgcatcgttggacgccaacgtcggcaacttttacgaagcgttcctgcagggctttcggtcgttcttcgccgagtcggcggcagatccgttggtcatctcgctgttgaccggtgtcgccaagcccgatctgctgcaactgatcaccaccgacagcgcgccgatcatcacccgcgcgtcggcccggctggcgccggccttcaccgatacctgggtggccaccaccgataacgacgccaatgtgctctcgcgtgcgatcgtgcggctgtgcttgagctacgtgtcgatgccgcccgaggccgaccatgatgtcgcagcggacctagcacggctaataacgccgttcgcggagcgtcacggtgtgatcaatgtcccctga

SEQ ID NO: 460 - DNA, 1251 bp, Mycobacterium Tuberculosis
atgaccacgcaaatcggctctggtggacccgaagccccccggccgcccgaagtcgaggagtggcgggacaagaagcgttacctgtggcttatgggcctcatcgccccgacggccttggtggtgatgctgccgctgatctgggggatgaaccagctcggctggcacgccgccgcgcaggtgccgctgtggatcggaccgatcctgctctacgtcttgttgccgcttcttgacctacgcttcgggcccgacgggcagaacccgcccgacgaggtgaccgaccggctggagaatgacaagtactaccgctactgcacctacatctacatcccgttccagtacctcagcgtggtgctgggcgcatacctgttcaccgccgcaaacctcagttggctcggctttgacggcgccttgagctgggcgggcaagcttggggtggcgctgtcggtcggtgtgcttggcggcgtcggtatcaacaccgcccacgaaatggggcacaagaaggattcgctggagcggtggctgtccaagatcaccctcgcccagacctgctacgggcacttctacatcgagcacaaccgtggccatcacgtccgggtgtccacaccggaggacccggcgtcggcgcggttcggcgagacgttgtgggagttcctgccccgcagtgttatcggcggcttgcgctcggccgttcatttggaggcccaacggctgcgtcggctcggcgtcagcccctggaatcccatgacgtatctgcgcaacgacgtgctcaacgcgtggctgatgtcggtggtgttgtggggtgggctgatcgcggtcttcggcccggcgctgatcccgttcgtcatcatccaggcagtcttcggcttcagcctgttagaggccgtcaactacctcgaacactacggactgctacggcagaagagcgccaacggccgctacgagcgctgcgccccggtgcacagctggaactccgaccacatcgtcaccaacctgttcctctaccacctgcagcgacacagcgatcaccacgccaaccccactcgccgctatcagacactgcggagcatggcgggtgcgcccaacctgcccagtgggtatgcatcgatgatctcgctgacctacttcccgccgttgtggcgcaaggtaatggatcaccgggtgctggagcactacggcggcgatatcactcgggttaacctgcacccgcgcgtgcgggagaaggcactcgcccgttacggagcctcggcatga

SEQ ID NO: 461 - DNA, 420 bp, Mycobacterium Tuberculosis
atgcgcgggccactgctgccgccgacagtcccggggtggcgcagccgggccgagcggttcgacatggcagtgctggaagcctacgaacccatcgagcgacgctggcaggagcgggtgtcgcagctggacatcgcggtcgacgagatcccgaggatcgcagccaaagatcccgaaagtgtgcagtggccgccggaagtcatcgccgacggaccgatcgcgctggcccggctcatcccggccggcgtggacgtccgcggaaatgcgacgcgcgcgcgaatcgtcttgtttcgcaaaccaattgaacgacgggccaaggacaccgaggaacttggtgaattgctgcacgaaatcctggtggcccaggtggccatctacctggacgtcgacccatccgtcatcgacccgacgatcgacgactag

SEQ ID NO: 462 - DNA, 1662 bp, Mycobacterium Tuberculosis
atgcaacctagtcatccgacgcgccctggtgcggtcatcagatatgtcggtagctcccttgatacttgtcccatgacgacgttcgccggcaaaacggctgcgtccgctgacaaggtgcgcgggggctactacacgccgccggcggtggcccgattccttgcccactgggttcaccaggcggggccgaagatcctcgaaccatcctgcggcgatggccgaatcctgcgcgaactctccgccatcacagaccacgcgcacggtgtggaactcgttgcgcgcgaggcgaaaaagtcgcgggacttcgcgtccgtcgacactgagaacctttttacctggctgcacaagacccaactcggcagctgggatggcgttgccggcaacccgccctacatccgcttcggaaactgggcatccgaacaacgggatccggcactcgaattgatgcggcgtgtgggcctacgaccgaccaaactgaccaatgcctgggtcccgtttgtcgtggcgagcacgacgctagcgcgtgacggcggccgagtgggcctggtggtcccggcggaattgcttcaagtcacctacgcggcgcagctacgcgaattcctgctgagccgctatcgggagatcaccctggttaccttcgagcggctggtgttcgacggaatcctgcaggaagttgtgctgttctgcggcgtcgtcggtcccggtcctgcacacatacgcaccgtcaggctcggcgatgcgaacgatctgaacgcgctgggggacaaggacttcaccaatgagtcagcgccggcgcttctccacgaaaaggagaagtggaccaagtacttcctcgaccccgctcaaatccggctactgcgaggactcaaacagtccgccactatgatcaggctcggcgaactggccgacgtggatgtgggcatcgtgaccggccgcaacagcttcttcacgttcaccgatgccaaggcacaagcgctgggattgcgagcgcactgcgttcccctggtctctcgcagcgcccaactcagcgggctgatctatgacgaggattgccgggcatgcgatgtcgccggcaaccaccgaacgtggctactcgacgccgcggactatccaaccgatccagctctcgtcgctcacatcaccgcgggtgaagcggccggcgtccacctcggctacaagtgctcgatccgcaagccatggtggagcacaccatcgctgtggatgcccgacctctttatgctgcgccagatccacttcgccccgcggctgaccgtcaacgctgccgcggcgaccagcaccgataccgtgcaccgggtccggctcgacccgaacgtcgatccggcaactcttgccgcggtgttccacaacagcgcgacattcgcgttcgccgagatcatgggccgcagttatgggggcggcatcttggagttggagcctagggaagccgagcaactacctatgccaccgccggcgtacgggagcgcagaacttgcccaggatgttgatctcctgctgaaagcaaacgagatcgacaaggcgctcgacgtcgtggaccgtcacgttctgatcgacgggctcggcttgtcgccgcgcctggtcgcaggttgccgagcggcatggctcacgctccgcgaccgcaggaccaagcgcggatctcggcgataa

SEQ ID NO: 463 - DNA, 1080 bp, Mycobacterium Tuberculosis
ttggcaactcaccaagtcgatgcggtggtcctggtcggtggcaagggtacccgactgcggccgttgacgctgtcggcgcccaagccaatgctgcctaccgccggactgccgttcctcacccatctgctgtcgcggatcgccgcagcgggcatcgagcacgtgatcctgggtacgtcctacaaacccgcagtcttcgaagcggagttcggcgacgggtccgcactgggcctacagatcgaatacgtgaccgaggagcatcccttggggactggcggcggcatcgccaacgttgccggcaagctgcgcaacgacaccgcgatggtgtttaacggcgatgtgctctcgggcgcggatctggcccaactgctggacttccaccgaagcaatcgagccgatgtcacgctgcaactggtgcgggtgggcgacccgcgggcattcggctgcgtacccaccgacgaggaggaccgcgtagtcgcctttctggagaagacggaggatccgccgaccgaccagatcaatgccggctgctatgtcttcgaacgcaacgtcatcgaccggattccgcagggccgggaggtttcggtggaacgcgaggtgttcccggccttgctcgccgacggcgactgcaagatctacggctatgtcgatgccagctattggcgggacatgggcacaccggaagacttcgttcgcggatcggcggatctggtgcgcggcatcgccccgtctccggccttgcgtggtcaccgcggtgagcagttggtgcacgacggtgcggcggtatctcccggtgcgttgctgattggcggcaccgtcgtggggcgtggtgccgaaatcggccccggcaccagattggacggcgcggtcatcttcgatggtgtccgggtggaggccgggtgcgtgatcgagcgttcgatcatcggcttcggtgctcgcatcggaccgcgggcgttgatccgcgacggtgtgatcggtgacggggccgacatcggcgcgcgctgcgagttgttaagtggtgcccgggtatggcccggtgtctttcttcccgacggcgggatccgttactcgtccgacgtttga

SEQ ID NO: 464 - DNA, 1185 bp, Mycobacterium Tuberculosis
atgccgaccagcaaccccgccaaaccacttgacgggtttcgggtattggatttcacccagaacgtggccgggccgctggccgggcaggtgctggtcgacctgggggctgaagtcatcaaggtggaggcgcccggcggtgaagcggcccgtcagatcacctcggtgttacccggacgcccgcccctggccacctactttctgcccaacaatcgtggcaagaagtcggtgacggtggacctaaccaccgagcaggccaagcagcagatgctgcggctcgcggacaccgccgacgttgtcttggaggcgtttcggcccggcaccatggaaaagctgggcctaggccctgatgacttgcgctctcgtaaccccaacctgatctacgcgcgcctaaccgcttacggcggcaacggcccgcacggcagccggccgggaatcgacctggtggtggccgccgaggccggcatgaccaccggaatgcccacgcctgagggcaagccacagatcatcccatttcagctcgtcgacaacgccagcggtcacgtgctggcccaggccgtgctggccgcgctgctgcaccgcgagcggaacggggtggccgacgtcgtccaggtcgcgatgtacgacgtcgcggtgggactacaagccaaccagctgatgatgcatctcaatcgggccgctagcgaccagccgaagcctgaaccggcaccgaaggccaagcggcgcaagggagtcggcttcgctacccagccatcggacgcgtttcgcaccgccgatgggtacatcgtcatcagcgcatatgtgcccaaacactggcagaagctgtgctacctcatcggccggcctgacctcgttgaagatcaacgatttgccgaacaacgctcccggtcgatcaactacgccgagttgaccgccgagttggaattggcactggccagcaagaccgccaccgaatgggtccagttgctgcaggcaaacggcctcatggcctgcctcgcccatacctggaaacaggtcgtcgacaccccccttttcgccgagaacgacctcaccctggaagtcggtcgcggggcggacaccatcacggtgatccgcacaccggcgcgctacgccagcttccgcgcggtcgtcaccgatcccccgcccaccgccggcgaacacaatgccgtgtttctggcccggccctga

SEQ ID NO: 465 - DNA, 1170 bp, Mycobacterium Tuberculosis
atggttggatgggccggaaacccgtcgttcgatctgttcaagctgcccgaggaacacgacgaaatgcgatcggcgatacgggctttggcggaaaaggagatcgctccgcatgccgccgaggtggacgagaaggcgcggttccccgaagaagcgctagtggcgctcaattcctccggtttcaacgccgtccacattccggaggagtacggcggtcagggtgccgactcggtagctacctgcatcgtgatcgaagaggtggcccgcgtcgacgcgtccgcgtcgttgatccccgcggtcaacaagctgggcaccatgggcctgatcctgcggggctccgaggagctgaagaagcaggtgctgccggcgttggccgccgaaggggcgatggcttcctatgcattgagtgaacgcgaggccggcagtgacgcggcgtccatgcggacgcgggccaaggccgatggggatcactggattctcaacggcgccaagtgctggatcaccaacggcggcaagtcgacctggtacacggtgatggcggtgaccgatcccgaccggggcgccaacggcatctcggcgttcatggtgcacaaggacgacgaggggttcaccgtcggtccgaaagaacgcaagctcgggatcaaggggtcaccgaccaccgagctgtacttcgagaactgccgcatccccggcgatcgcatcatcggtgagcccggtaccggtttcaagaccgcgctggccacgttggaccacacccgtcccacgattggcgcgcaggccgtgggtatcgcccagggcgcgctggatgctgccatcgcctacaccaaggaccgcaagcagttcggtgagtcgatcagtacgtttcaggccgtgcagttcatgctggccgacatggcgatgaaggtggaggcggctcggctgatggtttactccgccgccgcccgcgccgaacgcggtgagccggatctgggcttcatttcggcggcctcgaagtgcttcgcctccgacgtcgcgatggaggtcaccaccgatgccgtacaactgttcggcggcgccggctacaccaccgacttcccggtcgagcggtttatgcgcgacgccaagatcacccagatctatgagggcaccaatcagattcagcgggtagtgatgtcgcgggcgctactgcgctga

SEQ ID NO: 466 - DNA, 669 bp, Mycobacterium Tuberculosis
atgacccggctggtgctcgggtccgcctcccctggccggctcaaagtccttcgtgatgccggcattgagccgctggtcatcgcctcgcacgtcgacgaggatgtcgtcatcgcggcgctggggccggacgcggtcccgagcgatgtggtgtgcgtactggccgcggcaaaggccgcgcaggtcgcgaccacgctgaccggaacgcaacgcattgtggccgcggattgcgttgtcgttgcctgtgattcgatgctctacatcgaaggcaggctactcggcaagccagcgtcaatcgacgaggcgcgcgagcagtggcggtcgatggcgggccgggccggccaactctatacgggccacggtgttatccggttgcaggacaacaaaaccgtgtaccgtgctgctgaaacagcaataaccacagtatatttcggaacaccttcggcctccgatctggaggcttacctggccagtggggagtcgctgcgggtcgcgggtggattcaccctggacggtctgggcggctggttcatcgacggcgtgcagggcaatccgtcgaatgtgatcggcttgagcctgccgttgctgcggtcgctcgtgcagcgatgcgggctgtccgtcgccgcactgtgggcaggaaatgcgggcggcccagcgcacaagcagcagtag

SEQ ID NO: 467 - DNA, 1803 bp, Mycobacterium Tuberculosis
gtggctagtcacgccggctcgaggatcgctcggatctctaaggttctcgtcgccaatcgcggcgagatcgcagtgcgggtgatccgggcggcccgcgacgccggcctgcccagcgtggcggtgtacgccgaacccgacgccgagtccccgcatgttcggctggccgacgaggcgttcgcgctgggcggccagacctcggcggagtcctatctggacttcgccaagatcctcgacgcggcagccaagtccggggccaacgccatccaccccggctacggcttcctagcggaaaatgccgacttcgcccaggcggtgatcgacgccggcctgatctggatcggccccagcccgcagtcgatccgcgacctgggcgacaaggtcacggcccgtcacatcgcggcccgcgctcaggcgcccctggtgccgggtacccccgatccggtcaaaggcgccgacgaggtggtggcattcgccgaggagtacggcctgccgatcgcgatcaaggccgcccacggcggcggcggcaagggcatgaaggtggcccgcaccatcgacgagattccggagctgtacgagtcggcggtgcgcgaggccacggccgcgttcggccgcggtgagtgctacgtggagcgctatctcgacaagccgcgccacgtcgaagcacaggtgatcgccgaccagcacggcaacgtcgtcgtcgccggcacccgggactgctcgctgcagcgccgctaccagaagctggtcgaggaggcgcccgcaccgttcctgaccgactttcaacgcaaagagatccacgactcggccaaacggatttgcaaagaggcccattaccacggcgccggcaccgtcgaatacctggtcggtcaggacggcttgatctcgttcttggaggtcaacacgcgccttcaggtagaacacccggtcaccgaggaaaccgcgggcatcgacttggtgctgcagcaattccggatcgccaacggcgaaaagctggacatcaccgaggatcccaccccgcgcgggcacgccatcgaattccggatcaacggcgaggacgcggggcgtaacttcctaccggcgcccgggccggtgacaaagttccacccgccgtccggccccggtgtgcgggtggactccggtgtcgagaccggctcggtgatcggcggccagttcgactcgatgctggccaagctgatcgtgcacggtgccgaccgcgccgaggcgctggcgcgggcccggcgcgcgctgaacgagttcggtgtcgaaggcctggcgacggtcatcccgtttcaccgcgccgtggtgtccgacccggcattcatcggcgacgcgaacggcttttcggtacatacccgctggatcgagaccgagtggaataacaccatcgagccctttaccgacggcgaacctctcgacgaggacgcccggccgcgtcagaaggtggtcgtcgaaatcgacggtcgccgcgtcgaagtctcgctgccggctgatctcgcgctgtccaatggcggcggttgcgacccggtcggtgtcatccggcgcaagcccaagccgcgcaagcggggtgcgcacaccggcgcggcggcctccggtgacgcggtgaccgcgcctatgcagggcaccgtagttaagttcgcggtcgaagaagggcaagaggtcgtggccggcgacctagtggtggtcctcgaggcgatgaagatggaaaacccggtcaccgcgcataaggatggcaccatcaccgggctggcggtcgaggcgggcgcggccatcacccagggcacggtgctcgccgagatcaagtaa

SEQ ID NO: 468 - DNA, 1284 bp, Mycobacterium Tuberculosis
gtgaccgacttcgcattcgacgccccgaccgtcatccgcaccaaacgtgacggcggccggttgtccgacgccgccatcgactgggtcgtcaaggcctataccgacggccgggtcgccgacgaacagatgtcggcgctgctgatggcgatcgtttggcggggcatggaccgcggcgagatcgccagatggacggcggccatgctggcctcgggtgcccggctggatttcaccgatctgccactagcgaccgtggacaagcattccaccggcggggtaggtgacaaaatcacgctgccattggtgcccgtcgtcgccgcctgcggtggcgcagtgccccaggcgtcgggccgcggactcggccacaccggcggcaccctggacaagctggaatccatcaccgggttcaccgcgaatctgtccaaccagcgggtgcgcgagcagctttgcgacgtcggcgccgcgatcttcgccgccggccagctggcgccagccgatgccaagctgtatgcgctgcgcgacattaccggcaccgtcgaatcgctgccgttgatcgccagttcgattatgagcaagaagctggctgagggtgcgggtgcactggtgctcgacgtcaaggttggttccggggccttcatgaggtcgccagtgcaggcgcgcgaacttgcgcacaccatggtcgaactgggcgcggcgcatggcgtgcccacccgtgccctgctgacggagatgaactgcccgctgggtcgaaccgtcggcaatgcgctcgaggtggccgaggcgctggaggtgctggccggcggcggaccgcccgacgtggtggagctgacgttgcggctggccggcgagatgctcgagcttgccgggatccacggccgggacccggcccagacgctgcgggacggcaccgcaatggaccggtttcgccggttggttgccgcgcagggaggtgacttgtcgaaaccgttgccgatcggttcgcattcggaaaccgtcacggcgggcgcgagcggcacaatgggcgacatcgatgcgatggcagtggggttagcggcatggcgactcggtgcgggcaggtcccgcccgggcgcacgcgtacagcacggtgcgggggtgcggattcatcgccgcccgggggagccggttgtggtcggtgagccgttgttcaccctctacacgaatgctcccgagcgctttggtgcggcgcgagccgagctggccggcggttggagtatccgggacagtccgccgcaggtgcggccgctaatcgtcgatcggatcgtctga

SEQ ID NO: 469 - DNA, 402 bp, Mycobacterium Tuberculosis
atgcctgatgtcgattggaatatgctgcggggcaatgcaacccaggcagcagccggagcctatgtgccgtattcgcggtttgcggtgggtgcggccgcactggtcgacgatggtcgcgtggtgaccggatgcaacgtggaaaacgtctcgtatggcttgactttgtgcgccgaatgtgcggtggtgtgcgccctgcattcgaccggcggcggccggctgctcgcgctggcctgcgtcgacggccatggatccgtgctgatgccgtgcgggcgatgccgtcaggtgctgctcgaacacgggggttccgagctactgatcgaccatccggtgcgaccccgccggctcggcgacctgctgcccgacgccttcggcctcgacgacctcccccgggaacgccggtga

SEQ ID NO: 470 - DNA, 666 bp, Mycobacterium Tuberculosis
atgattactgtcaatgtgctctactttggcgcggttcgcgaagcgtgcaaggtcgctcacgagaagatctcactcgaaagcggcaccaccgtcgacggcttagtcgaccaattgcaaatcgactatccgccacttgctgattttcgcaagcgagtgcggatggccgttaacgaatccatagcgccagcatcaacgattctcgacgatggcgacacggtggcgttcataccgcaggttgccgggggctccgatgtctactgccggctcaccgatgagccgctgagcgtcgatgaagtgctcaacgcgatatctggaccttcccagggcggcgccgtcatcttcgtgggtaccgtgcgtaacaacaacaacggccacgaagtgaccaagttgtactacgaggcctatccggccatggtgcaccgcacgctgatggacatcatcgaagagtgtgaacgacaggccgacggtgtgcgagttgccgtggcacaccggaccggtgaattgcgcatcggtgatgcggcggttgtcatcggtgcttcggctcctcaccgcgcggccgcgttcgacgccgctcgcatgtgcatcgagcggctcaaacaggatgtgccgatatggaagaaggagttcgcactcgacggtgttgagtgggtggccaatcggccatga

SEQ ID NO: 471 - DNA, 1011 bp, Mycobacterium Tuberculosis
atgagcacccctaccgggtcccgccggatcttctccggcgtgcagcccacgtctgactcgcttcacctcggtaatgccttgggcgccgtcgcccaatgggttggcttgcaggatgaccacgatgcgttcttctgcgtggtcgacctgcatgcgatcaccatccctcaggatcccgaggcactgcggcgccggaccctgattaccgccgcgcaatacctggcgttgggaatcgatcccggccgcgccaccatcttcgtgcaaagtcaggtgccggctcacacccagctggcgtgggtgctgggttgtttcaccggctttggccaggcgtcgcggatgacccagttcaaagacaagtcggcgcgtcagggcagcgaggccaccaccgtcggcctgttcacctacccggtactgcaggccgcggacgtgttggcctacgacaccgagctggtgcccgtcggggaggatcagcggcagcacctcgagctggcccgcgacgtcgcgcaacggttcaacagccgattccccggcaccctggtggttcccgacgtgctcatccccaagatgaccgccaaaatctacgatctacaagacccgacgtcaaagatgagcaaatcggcgggcaccgatgccggtttgatcaacctgctcgacgatccggcattgtccgccaagaagattcgctccgccgtgaccgacagcgaacgtgacatccgctatgacccggacgtcaagccaggggtgtctaacctgttgaacatccagtcggcggtcaccgggaccgacatcgacgttctcgtcgacggctatgccggacacggctacggcgatttgaagaaagacaccgccgaggccgtcgtcgaattcgtcaacccgatccaagccagagttgacgaattgaccgcagatcccgcggagctggaggccgtgctcgccgccggggcgcagcgcgcccacgatgtggccagcaaaacggttcagcgagtctacgatcggctcgggttccttctataa

SEQ ID NO: 472 - DNA, 4617 bp, Mycobacterium Tuberculosis
atggtcatgtcgctgatggtggcgccggagctggtggcggcggccgcggcggacttgaccgggattgggcaggccatcagcgcggcgaatgcggcggcagcgggcccgacgacgcaggtgttggcggccgccggtgatgaggtgtcggcggcgatcgcggcgttgtttggtacccacgcgcaggagtaccaggcgttgagcgcccgggtggcgacgtttcatgagcagtttgtgcgctcgctgaccgcggctggcagcgcgtatgcgactgccgaggcggcgaatgcatcaccgctgcaggcgctggagcagcaagtgttgggtgcgatcaacgcgcccacacagctgtggttggggcgcccgctgatcggtgatggcgttcacggggcgccggggaccgggcagcccggtggggccggggggttgttgtggggtaatggcggtaacggcggttcgggggcggccggtcaagtcggtgggcccggcggcgcggccgggttgttcggcaacggcgggtccggcgggtccggcggggccggcgctgccggcggtgtcggcggatccggcgggtggttgaacggcaacggcggggccggcggggccggcgggaccggcgctaacggtggtgccggcggcaacgcctggttgttcggggccggcgggtccggcggcgccggcaccaatggtggcgtcggcgggtccggcggatttgtctacggcaacggcggcgccggcgggatcggcggcatcggaggtataggcggcaacggtggcgacgccgggctgttcgggaacggcggcgccgggggggccggggccgcgggcctgccgggtgccgccggcctcaacggcggcgacggcagcgacggcggcaacggcggaaccggcggcaacggcgggcgcggcgggttattggttggcaacggcggggccggcggggccggcggcgtcggcggcgacggtggtaagggcggcgctggcgatccgagtttcgccgtcaacaacggtgccggcggtaacggcggtcacggcggcaaccccggcgtgggcggggccggtggggccggcggcctgctggcgggtgcgcacggtgccgccggcgccacccccaccagcggcggcaacggcggcgatggcggcatcggcgccaccgccaactcacccctacaagccggcggggccggcggtaatggcggtcatggcgggttggtcggcaacggcggcaccggcggcgccggcggtgccggtcatgcgggttccaccggcgctaccggtaccgccttacaaccgacgggcggtaacggcaccaatggcggcgccgggggccacggcggtaatggcggaaatggcggcgcccagcacggcgacggcggcgtcggcggcaagggcggtgccggcggtagcggcggcgccggcggaaacggattcgacgccgccaccttgggttcgcccggtgccgatggcggtatgggcggcaacggcggcaagggcggtgacggcggcaaggccggtgatggcggagccggtgccgccggtgatgtgaccttggccgtcaaccagggtgccggcggtgacggcggcaacggcggtgaagtgggcgttggcggcaagggtggggccggcggtgttagcgcgaacccggccctgaacggttcggccggggcgaacggcaccgcgcccaccagcggcggcaacggtggcaacggaggtgccggcgccacccccaccgtcgcgggagaaaacggcggcgccggtggtaacggcggccatggcgggtcggtcggtaacggcggtgcgggtggtgccggcggaaatggcgtcgccggcaccggccttgccctcaacggcggcaacggcggcaacggcggcatcggcggcaacggcggatcggcggccggcacgggcggggacggcggcaagggcggcaacgggggcgccggagccaacggccaagacttctccgcgtccgccaatggcgcgaatggcggacagggcggcaacggcggcaacggcggcatcggcggcaagggtggtgacgccttcgccacgttcgctaaggccggcaacggcggtgccggcggcaacggcggcaatgtgggcgttgccggccagggtggggccggcggcaagggcgccattccagccatgaagggtgcgaccggcgccgatggcaccgcacccaccagcggcggtgacggcggcaacggcggcaacggcgccagccccaccgtcgcgggcggcaacggcggtgacggcggcaagggcggcagcggcgggaatgtcggcaatggcggcaatggcggggccggcggcaacggcgcggccggccaagccggtacgccgggccctaccagcggtgattccggcacctcgggcaccgacggtggggctggcggcaacggcggggcgggcggcgccggcggaacactggccggccacggcggcaacggtggtaagggtggtaacggcggccagggtggcatcggcggcgccggcgagagaggcgccgacggcgccggccccaatgctaacggcgcaaacggcgagaacggcggtagcggtggtaacggtggcgacggcggcgccggcggcaatggcggcgcgggcggcaaggcgcaggcggccgggtacaccgacggcgccacgggcaccggcggcgacggcggcaacggcggcgatggcggcaaagccggtgacggcggggccggcgaaaacggcctaaacagcggggccatgctgccgggcggcggcaccgtaggaaaccccggtaccggcggcaacggcggcaacggcggcaacgccggcgtcggcggcaccggaggcaaggccggcaccggctccttgacgggcttggacggcaccgacggcatcacccccaacggcggtaacggcggcaatggcggcaacggcggcaagggcggcaccgccggcaacgggagcggcgcggccggcggcaacggcggcaacggcggctccggcctcaacggcggtgacgccggcaacggcggcaacggcggtggggcgctgaaccaggccggcttcttcggcacgggcggcaaaggcggtaacggcggcaatggcggtgccggcatgatcaacggcggcctcggcggcttcggcggcgccggcggtggcggcgccgttgacgtcgccgcgacaacgggcggcgctggcggcaatggcggtgccggcggcttcgctagcaccgggttgggtggcccaggcggcgccggcggtcccggcggcgcgggcgactttgctagcggtgttggcggtgtcggcggcgccggcggggacggcggtgccggcggggtcggcggcttcggcggccagggcggcatcggcggggaagggcgcacaggcggcaacggcggtagcggcggcgacggcggtggcggcatttccttaggcggcaacggcggcctcggcggcaacggcggcgtctccgagactgggtttggcggcgccggcggcaacggcggctacggcggtccgggaggccccgaaggcaatggcggcctcggcggcaacggcggcgccggcggcaacggcggcgtcagcaccacgggcggcgacggcggcgccggcggcaagggcggcaacggcggcgacggcgggaacgtcggtttgggcggtgacgccggctccggcggcgcgggcggcaatggcggtatcggcaccgacgcgggcggtgccggaggggccggtggcgctggcggtaacggcggtagcagcaaaagcacgaccaccggcaacgccggctccggtggtgccggcggtaatgggggcactggcctcaacggcgcgggcggtgctggcggggccggcggcaacgcgggtgtcgccggcgtgtccttcggcaacgctgtgggcggcgacggcggcaacggcggcaacggcggccacggcggcgacggcacgacgggcggcgccggcggcaagggcggcaacggcagcagcggtgccgccagcggctcaggcgtcgtcaacgtcaccgccggccacggcggcaacggcggcaatggcggcaacggcggcaacggctccgcgggcgccggcggccagggcggtgccggcggcagcgccggcaacggcggccacggcggcggtgccaccggcggcgacggcggcaacggcggcaacggcggcaactccggcaacagcaccggcgtcgcgggcttggccggtggtgccgccggcgccggcggcaacggcggcggcacttccagcgccgccggccacggcggcagcggcggcagcggtggcagcggcaccacgggcggcgccggcgcggccggcggcaacggcggcgccggtgctggcgggggcagcctgagcacaggccagtccggcggcccacggcggcagcggtggtgccggtggcaacggcggcgctggctcggccggcaacggcggcgccggtggtgccggtggcaacggcggtgccggcggcaacggtggcggtggcgatgccggcaacgccggctcaggcggcaatggcggcaagggcggcgacggtgtcggccctggctccaccggcggcgcgggcggcaagggcggcgctggcgccaacggcggttccagcaacggcaacgctcgcggtggcaacgccggtaa

SEQ ID NO: 473 - DNA, 9474 bp, Mycobacterium Tuberculosis
ttgaattttccagttctgccaccggaaatcaactccgtgctgatgtattcgggtgcggggtcgagcccgttgctggcggcggccgcggcgtgggatgggctggctgaggagttggggtcggcggcggtgtcgtttgggcaggtgacgtcgggcctgacggcgggggtgtggcagggtgcggcggcggcggcgatggcggccgcggcggccccgtatgcggggtggttgggttcggtggcggcgcaggccgtggcggtggccgggcaggcgcgggccgcggtggcggcgtttgaggcggcgttggcggcgacggtggatccggcggcggtggcggtcaaccggatggcgatgcgggcgttggcgatgtcgaacctgctggggcagaacgccgcagcgatcgcggccgtcgaggccgagtacgagttgatgtgggccgccgatgtggcggcgatggccggctaccattccggcgcgtcggctgctgccgcggcgttgccggcgttcagcccaccggcgcaggcgttggggggtggtgtcggcgcgttcctcaatgctctatttgccggacccgcgaagatgttgaggcttaacgcgggcttgggcaatgtcggtaattacaacgtcgggttgggcaatgtcgggatattcaacctgggcgcagccaatgtcggtgcgcagaatttgggtgctgccaacgccggtagcgggaatttcggtttcggcaatatcggcaacgccaacttcgggttcggcaactcgggtcttgggttgccgccgggcatgggcaatattgggttgggcaatgcgggcagcagcaactacggcctcgcaaacctgggtgtgggcaacatcggttttgccaacacgggtagcaacaacatcgggatcgggttgaccggggacaacctgactggcattgggggcctgaattcaggaaccggtaatctggggttgttcaactccggcaccggcaacattgggttcttcaattcggggaccggcaacttcggggtattcaactcgggcagctacaacaccggtgtcggtaatgcggggacggccagtaccgggttgttcaacgttggtgggttcaacacgggtgtggccaacgtgggtagctataacacgggcagcttcaacgcgggcaacaccaatacgggtggcttcaacccgggcaacgtcaacaccggctggctgaacaccggcaacaccaacaccggcatcgccaactcgggcaatgtcaacaccggcgcgttcatctcgggcaacttcagcaacggtgtgctgtggcggggtgactacgagggcctgtgggggctctccggtggatcgaccattccggcgatccccattggtctcgagctcaacggcggcgtcggccccatcaccgtgttgccgatccagattttgcccaccatcccgctcaacattcaccaaaccttcagcctcggcccgctggtcgttccggacatcgtgatccccgcttttggtggcggtacggccatacctatcagcgtcggccccatcaccatctcgcccatcaccctgttcccggctcagaacttcaacacgactttccccgtcggccccttctttggcttgggggtcgtcaacatttcaggaatcgaaatcaaagatcttgccggcaacgtcaccctccaattaggtaaccttaatatcgacaccagaattaaccagtcattcccggtgaccgtcaactggagtaccccggcagtaacgatcttcccgaatggcatcagtattcccaacaatccactggcgctgctggccagcgcgtcgatcggcacgctgggattcacgatcccgggcttcaccattcccgctgcgccgctgccgctgacgatcgacatagacggccagattgacggcttcagcaccccgccgatcacgatcgaccgcatcccgctgaacctcggcgccagcgtcactgtcggccctatcctgatcaacggcgttaatatcccggcgaccccgggctttggcaacacgaccaccgctccgtcgtcgggtttcttcaactccggcgacggtggggtgtcgggcttcgggaatttcggtgcgggcagctcgggttggtggaaccaggcgcagaccgaggtggctggggcgggttcgggtttcgccaatttcggttcgctgggatcgggtgtgctgaacttcggctcgggtgtgtcggggctgtacaacaccggcgggttgccgccggggaccccggcggtggtctcgggcatcggcaatgttggtgagcagctgtcggggttgtcctcggcggggacggcactcaaccagagcctcatcatcaatctcgggttggccgatgtgggcagcgtaaacgtcggtttcggcaacgtcggggacttcaacctgggtgcggccaatatcggcgacttgaacgtgggtttgggcaatgtcggcggcggcaacgtcgggttcggcaatatcggcgatgccaacttcgggttgggcaatgcgggtctggcggcgggcctggccggggtgggcaacatcgggttgggcaatgccggcagcggcaacgtcggcttcggcaacatgggtgtgggcaacatcgggttcggtaacaccggcaccaacaacctcgggattgggctgaccggggacaaccagactgggatcggcggcttgaactccggtgccggcaacatcgggttgttcaactccggcaccggcaacgtcgggttgttcaactccgggaccgggaacttcgggttgttcaactcgggcagcttcaacaccggcatcggcaatggcggaacgggcagtactgggcttttcaatgccggtaatttcaataccggtgtggccaaccctgggtcgtacaacacgggcagcttcaatgtgggtgacaccaacaccggtggtttcaacccgggcagcatcaacaccggctggttcaacaccggcaacgccaacaccggcgtcgccaattcgggcaatgtcgacaccggcgccctcatgtcgggcaacttcagcaacggcatcttgtggcgaggcaacttcgagggcctgttcggcctgaacgtcggcatcacgattcccgaattcccgatccactggacttcaaccggcggcatcggccccattatcatcccggacaccacgatccttccccccatccacctgggcctcacgggacaagcgaactacggcttcgccgtgccggacatccccattccggcaatccacatcgacttcgacggtgccgccgacgccggcttcaccgccccggccaccaccctgctttctgcgctgggcattaccggacaattcaggttcggcccgatcaccgtctcaaacgtccagctcaatccgttcaacgttaacctcaagcttcagttcctccacgacgcgttcccaaatgaatttcccgatcccacaatctcggttcagatacaggtcgccataccccttacttcggcaacgctgggcggattggccctgccgctgcagcagaccatcgacgccatcgaattgccggcaatctcgttcagccaatccatacccatcgacattccgccgatcgacatcccggcctccactatcaacggaatttcgatgtcggaggtcgtgccgatcgatgtgtccgtcgacattccggcggtcaccatcaccggcaccaggatcgacccgattccgctgaacttcgacgttctcagcagcgccggacccatcaacatctcgatcatcgacattccggcgctgccgggctttggcaactcgaccgagctgccgtcgtcgggcttcttcaacaccggcggcggtggcggctcgggcatcgccaacttcggcgcgggggtgtccggcttgctgaaccaggcctcgagtccgatggtggggacgctctccggcctgggcaatgccggcagcctggcatccggtgtgctgaactccggcgtcgacatctcgggcatgttcaacgtgagcacgctgggctccgcgccggcggtgatctcgggtttcggcaacctgggcaaccacgtgtcgggggtgtccatcgatggcctgctggcgatgctgaccagcggcgggtcgggcggctccgggcagccgagcatcatcgacgcggcgatcgccgagctgcggcacctgaatccgctgaacatcgtcaacctgggcaacgtcggcagctacaacctcggcttcgccaacgtcggcgacgtcaacctgggcgcgggcaacctcggcaacctcaacctcggcggtggcaacctcggcgggcagaacctggggttgggcaacctcggggacggcaacgtcgggttcggcaacctcggccacggcaatgtcgggttcggcaactcgggcctgggggcgctgccggggatcggcaacatcgggttgggcaacgccggcagcaacaacgtcggcttcggcaacatgggcctgggcaacatcgggttcggcaataccggcaccaacaacctcgggatcgggctgaccggcgacaaccagaccgggttcggcggcctgaactccggtgccggcaacctggggttgttcaactccggcaccggcaacatcgggttcttcaacaccgggaccggaaactgggggttgttcaactcgggcagctacaacaccggcatcggtaacagcggaacgggcagtaccgggcttttcaatgccgggagtttcaacacgggtctggccaatgccggtagttacaacaccggcagcctcaacgcgggcaacaccaacaccggcggcttcaaccctggcaatgtcaacaccggctggttcaacgccggccacaccaacaccggcggcttcaacacgggcaatgtcaacaccggcgcgttcaactccggcagcttcaacaacggcgcgctgtggaccggtgatcaccacgggctggtcggcttctcctacagcatcgaaatcaccggcagcaccctggtggacatcaacgaaaccctcaacctcggtcccgtccacatcgatcagatcgatattcccggcatgtcgctgttcgacatccacgaactcgtcaacatcgggcccttcaggatcgagcccatcgatgtccccgcagtggtgctggacatccacgaaacgatggtcatcccgcccatcgtcttcctgccgagcatgacgatcggcggtcagacctacacgattccgctcgacacgcccccggcccccgccccgccgcccttcagacttccgttgctgttcgtgaatgcgctcggcgacaactggatcgttggggcgtccaactcaaccggaatgagtggtggctttgtcaccgcacccactcagggcatcctgatccataccggtcccagcagcgcaaccaccggtagcctcgcactaaccctcccaaccgtcaccatcccaacgatcacgacatcgcctatcccgctcaagatcgatgtgtcgggcggtcttccggccttcacgctgttccccggtggcctcaacatcccgcaaaatgcgatcccgttgaccatcgatgcgtccggcgtgctggatccgatcacgatattcccgggtggtttcacgatcgatccgctgccactgagcctggccctcaacatcagcgtgccggacagcagcgttccgatcatcatcgttccgccgacgcccggcttcgggaacgcgaccgccaccccgtcgtcgggtttcttcaactccggcgcgggcggggtgtcgggtttcggcaacttcggggccggcagctcaggctggtggaaccaggcgcatgccgcgttggcgggcgcgggctcgggcgttctcaacgttggcacgctgaactcgggtgtgctgaacgtcggctcggggatatcggggctgtacaacaccgctatcgtgggtttggggacgccggcgctggtgtcgggtgccggcaacgtgggccagcagctgtcgggggtgttggcggccgggacggcgttgacccaaagccccatcatcaacctcgggttggccgatgtcggcaactacaacctcgggttgggcaacgttggggacttcaacctgggcgcggccaacctcggcgacctcaacctagggttgggcaatatcgggaacgccaacgtcggcttcggcaatatcggccacggcaacgtcgggtttggcaattcgggcctgggggcggcgctcggcatcggcaatatcgggttgggcaatgcgggcagcaccaacgttggcctggccaacatgggtgtgggcaacatcgggttcgccaacaccggcaccaacaacctcgggattgggctgaccggcgacaaccagaccggcatcggcggcttgaactccggtgccggcaacattggcctgttcaactccggcaccggcaacatcgggttcttcaactccgggaccggaaactgggggttgttcaactcgggcagcttcaacaccggcatcggtaatagcggaacgggcagtactgggcttttcaatgccggtggtttcactacgggtctggccaacgccgggtcgtacaacacgggcagcttcaatgtcggtgacaccaacaccggtggcttcaacccgggcagcatcaacaccggctggttcaacaccggtaacgccaacaccggcatcgcgaactcgggcaatgtcgacaccggcgccctcatgtcgggcaacttcagcaacggcatcctgtggcggggcaactacgaaggcctattcagctattcctacagcctcgacgttccccggatcaccatcctggacgcgcatttcaccggggccttcggcccggtggtcgtcccgcccatcccggttctggcgatcaacgcgcacctgaccggcaacgcggcgatgggcgccttcaccatcccgcaaatcgatattcccgccctcaatccgaacgtcaccggaagcgtcggcttcggccccatcgcggtcccctcggtcaccattcccgccctgaccgccgcacgagcggtcctcgatatggccgcgtcggtcggggcgaccagcgaaatagagccgtttatcgtctggacgtcatccggtgcgatcggcccaacgtggtactcggtcggcagaatctacaacgccggtgacctgttcgtcggcggcaatatcatctcgggaatcccgacgctcagcacgaccggcccggtgcatgccgtcttcaatgcggcatctcaggcgttcaacaccccggcgctcaatattcaccagatcccgttgggtttccaggtgccgggcagcatcgacgcgatcaccctgttccccggtggtctgacgttcccggcgaactcgctgctgaacctggatgtgttcgtcggcacccccggcgccaccattccggcgatcacgttcccggagatcccggcgaacgccgacggcgaactctacgtcatcgccggcgacatcccgctgatcaacatcccgcccaccccgggcattgggaacaccaccaccgttccgtcgtcgggcttcttcaacaccggggcgggcgggggctcgggtttcggcaacttcggcgcgaacatgtcggggtggtggaaccaggcgcacaccgctttggcaggcgcgggttcgggtattgccaacgtcggcacactgcactccggcgtgctcaacctcggttcggggctgtcggggatctacaacaccagcacgctgccgcttgggacgccggcgttggtgtcgggcctgggcaacgtcggtgatcacctgtcgggcttgttggcctccaacgtggggcaaaaccccatcaccatcgtcaacatcgggttggctaacgtcggcaacggcaacgtcggcctcggcaacatcggcaacctcaacctgggtgcggccaacattggcgacgtgaacctgggattcggcaacattggcgacgtgaacctgggcttcggcaacatcggcggcggcaacgtcgggttcggcaatatcggcgatgccaacttcgggttcgggaattcgggtctggcggcgggcctggccggcatgggcaatatcgggctgggcaacgccggcagcggcaacgtcggctgggccaacatgggcctgggcaacatcgggtttggcaacaccggcaccaacaacctcgggatcgggctcaccggcgacaaccagtccggcatcggcggcttgaactccggcactggcaacattggcctgttcaactccggcacaggcaatatcggcttcttcaactccgggactgccaacttcgggttgttcaactccggcagctacaacaccggtatcggcaactccggggtggccagcaccgggttggtcaacgccggcggcttcaacaccggtgtggcaaacgccgggtcgtacaacacgggcagcttcaatgctggtgacaccaacaccggtggcttcaacccaggcagcaccaacaccggctggttcaacaccggtaacgccaacaccggcgtcgccaacgcgggcaatgtcaacaccggcgccctcatcacgggcaactttagcaacggcatcttatggcggggcaattacgagggcttggccggcttctccttcgggtaccccattccgctgttccccgcggtgggcgccgacgtcaccggcgacatcggccccgccaccatcattccgcccatccacatcccgtccatcccgttgggcttcgccgcgatcggccacatcgggccgatcagcatcccgaacatcgccatcccctcgatccacctgggcatcgatcccaccttcgacgtcggccctatcaccgtggaccccatcaccctcaccatccctggcctaagtttggatgctgccgtctcggagatcaggatgacgtccggaagcagctccggattcaaggtcagacccagcttttcattcttcgcggtcggacccgacggcatgcccgggggcgaggtctccatacttcaaccattcaccgtggcacccatcaacttgaacccgacgacactgcacttccccggattcaccattcccaccggacccatccacatcggcctgccgctgtcgctgaccattccgggcttcaccatcccgggcggcaccctgattccccaactcccgctgggcctcggtttgtccggcggcaccccaccctttgatctcccgacggtcgttatcgaccggatcccggtggagttacacgccagcaccaccatcggccccgtcagcctcccgattttcgggttcggcggagcaccgggctttggcaacgacaccaccgcgccgtcgtcgggcttcttcaacaccggcggtggtggcgggtccggcttctccaactccgggtcgggcatgtcgggggtgctcaacgcgatctcggatccgctgctcgggtcggcgtcgggcttcgccaatttcggcacccagctctccggcatcctcaaccgtggcgcgggcatctcgggcgtgtacaacacgggcacgcttggcctggtcacatcggccttcgtctcgggctttatgaacgtcggccagcagctgtcgggcctgctgttcgcgggcaccgggccgtaa

SEQ ID NO: 474 - DNA, 11151 bp, Mycobacterium Tuberculosis
atggagtttccggtgttgccaccggaaatcaactccgtgctgatgtattcgggtgcggggtcgagcccgttgctggcggcggccgcggcgtgggatgggctggctgaggagttggggtcggcggcggtgtcgtttgggcaggtgacgtcgggcctgacggcgggggtgtggcagggtgcggcggcggcggcgatggcggccgcggcggcgccgtatgcggggtggttgggttcggtggcggccgcggccgaggcggtggccgggcaggcgcgggtggtggtgggggtctttgaggcggcgttggcggcgacggtggatccggcgctggtggcggccaaccgggcgcggctggtggcgttggcggtgtcgaatctgttggggcagaacacgccggcgatcgcggccgccgaggccgagtacgagctgatgtgggccgccgatgtggcggcgatggccggctaccattccggcgcgtcggctgctgccgcggcgttgccggcgttcagcccaccggcgcaggcgctggggggaggtgtcggcgcgttccttaccgccctgttcgccagccctgcgaaggcgctgagcctgaatgcgggtttgggcaatgtcggcaattacaacgtcgggttgggcaatgtcggggtgttcaacctgggcgcgggcaatgtgggtgggcagaatctgggtttcgggaatgccggtggcaccaatgtcgggttcggcaacctcggtaacgggaatgtcgggttcggcaactccggtctgggggcgggcctggccggcttgggcaatatcgggttgggcaatgcgggcagcagcaactatggtttcgcaaacctgggtgtgggcaacatcggtttcggcaacaccggcaccaacaacgtcggcgtcgggctcaccggcaaccacctgacgggtatcgggggcctgaattcgggcaccgggaatatcgggttgttcaactccggcaccgggaatgtggggttcttcaattcggggaccgggaacttcggggtgttcaactcgggtaattacaacaccggtgtcggtaatgcggggacggccagcacggggttgttcaatgccggcaatttcaacaccggcgtggtgaacgtgggcagttacaacaccggcagtttcaacgccggcgacaccaacaccggtggcttcaaccccggcggtgtgaacaccggctggctgaacaccggcaacaccaacaccggcatcgccaactcgggcaacgtcaacaccggcgcgttcatctcgggcaacttcaacaacggcgtgctgtgggtgggtgactaccagggcctgttcggcgtctccgccggctcgtcgatccccgcaattcccatcggcctggtgctcaacggcgacatcggcccgatcaccatccagcccatcccgatcctgcccaccatcccgctcagcattcaccaaaccgtcaacttgggcccgctggtggttcccgacatcgtgatccccgccttcggcggcggtatcggcatacccatcaacatcggcccgctgaccatcacacccatcaccctgtttgcccaacagacatttgtcaaccaattgccctttcccaccttcagtttagggaaaatcacaattccacaaatccaaacctttgattctaacggtcagcttgtcagctttatcggccctatcgttatcgacaccaccattcccggacccaccaatccacagattgatttaacgatcagatgggatacccctccgatcacgctgttcccgaatggcatcagtgctcccgataatcctttggggttgctggtgagtgtgtcgatcagtaacccgggctttaccatcccgggatttagtgttcccgcgcagccgttgccgttgtcgatcgatatcgagggccagatcgacgggttcagcaccccgccgatcacgatcgatcgcatccccctgaccgtggggggcggggtcacgatcggccccatcacgatccagggccttcatatcccggcggcgccgggagtggggaacaccaccacggccccgtcgtcgggattcttcaactccggtgcgggtggggtgtcgggtttcggcaacgtcggcgcgggcagctcgggctggtggaaccaggcgccgagcgcgctgttgggggccggttcgggtgttggcaacgtgggcaccctgggctcgggtgtgctcaacctgggctcagggatctcggggttctacaacaccagcgtgttgcctttcgggacaccggcggcggtgtcgggcatcggcaacctgggccagcagctgtcgggggtgtcggcggcgggaaccacgctgcgctcgatgctcgccggcaacctcgggttggccaatgtgggcaacttcaacaccgggttcggaaatgtcggggacgtcaacctgggtgcggccaacatcggtgggcacaacctgggcctgggcaatgtcggggacggcaacctggggttgggcaacatcggccatggcaacctggggtttgccaacttgggcctgaccgccggcgcggcgggggtgggcaatgttggttttggcaatgccggcatcaacaactatggcttggcgaacatgggtgtgggcaatattgggtttgccaacaccggcacgggcaacatcgggatcgggctggtcggggaccatcggaccgggatcgggggcttgaactccggcatcggcaatatcgggttgttcaactccggcaccggcaacgtcgggttcttcaattccgggaccggcaacttcggcatcgggaactccggccgcttcaacaccgggatcggtaatagcggaacggccagcaccgggctcttcaatgccggcagcttcagcaccggcatcgccaacactggtgactacaacacgggcagcttcaacgccggcgacaccaacaccggtggcttcaacccgggcggcatcaacaccggctggttcaacaccgggcatgccaacaccgggttggccaacgcgggcaccttcggcaccggcgccttcatgacgggcgactacagcaacggcctgttgtggcggggcggctacgagggcctggtcggcgtccgcgtcgggcccacgatctcccaattcccggtcaccgtgcacgcgatcggcggggtgggcccgctgcatgtggcgcccgtcccggtacccgccgtgcacgtcgagatcaccgacgccaccgtcggcctgggtccgttcaccgtcccaccgatcagcattccctcacttcccatcgccagcatcaccggaagcgtggacctggccgcaaacaccatctcgccgattcgcgctcttgacccgctcgccggttcgatagggctttttctcgagccgttccgcctcagtgacccatttatcaccattgatgcgttccaagttgttgccggtgtcttgttcctagagaacatcattgtgcccggcctcacggttagcggtcagatattggtcaccccgacaccaattcccctaaccctcaacttggacaccaccccgtggacgcttttcccgaatggtttcaccattcccgcgcaaacccccgtgacggtgggtatggaggtcgccaacgacgggttcaccttcttcccgggtgggctgacctttccgcgggcctccgccggggtcaccggactgtccgtggggctggacgcgttcacgctgttgcccgacgggttcaccctcgacaccgtgccggcgaccttcgacggcaccatcctcatcggcgatatcccgatcccgatcatcgatgtgccggcggtgccggggttcggcaacaccaccacggccccatcgtcggggttcttcaacaccggcggcggcggtggatcggggttcgccaacgtcggcgcgggcacgtcgggctggtggaaccaggggcacgacgtgttagcaggggcgggctcgggagttgccaatgccggcacgctgagctcgggcgtgctgaacgtcggctcggggatctccgggtggtacaacaccagcaccctgggagcgggcaccccggcggtggtctcgggcatcggcaacctcggccagcagctgtcggggttcttggcaaatgggaccgtgctcaaccggagccccattgtcaatatcgggtgggccgatgtgggcgcgttcaacaccgggttgggcaatgtgggggacctcaactggggtgcggccaacatcggcgcgcagaacctgggcctgggcaatctcggcagcgggaacgtcgggttcggcaacatcggtgccggcaacgtcgggttcgccaactcgggtccggcggtgggcctggccggcctgggcaacgtggggttgagcaatgccggcagcaacaactgggggctggccaacctgggtgtgggcaacatcgggttggccaacaccggcacgggcaacatcgggatcgggctggtcggcgactaccagaccggcatcggcggcctcaactcgggtagtggcaatatcggattgttcaattccggcaccggcaatgtcgggttcttcaacaccggcaccggcaacttcggactgttcaactccggtagtttcaacaccggcatcggtaatagcggaaccggcagtactgggctcttcaatgccggcaatttcaacaccggcatcgccaaccccgggtcgtacaacacgggcagcttcaatgtcggtgataccaacaccggtggtttcaacccgggcgacatcaacaccggctggttcaacaccggcattatgaatacgggcacccgcaacaccggcgccctcatgtcggggaccgacagcaacggcatgctgtggcgcggcgaccacgagggcctgttcggcctgtcctatggcatcacgatcccgcaattcccgatccgcatcaccacgactggcggtatcggccccatcgtcatcccggacaccacgatccttccgccgctgcacctgcagatcaccggcgacgcggactacagcttcaccgtgcccgacatccccatccccgccatccacatcggcatcaatggcgtcgtcaccgtcggcttcaccgccccggaagccaccctgctgtccgccctgaagaataacggtagcttcatcagcttcggccccatcacgctctcgaatatcgatattccgcccatggatttcacgttaggcctgcccgttcttggtcctatcacgggccaactcggaccaattcatcttgagccaatcgtggtggccgggatcggtgtgcccctggagatcgagcccatccccctggatgcgatttcgttgagtgagtcgattcctatccgcatacctgttgatattccggcctcggtcatcgatgggatttcaatgtcggaagtggtgccgatcgatgcgtccgtggacatcccggcggtcacgatcacaggcaccaccatttccgcgatcccgctgggcttcgacattcgcaccagtgccggacccctcaacatcccgatcatcgacatcccggcggcgccgggcttcgggaactcgacccagatgccgtcgtcggggttcttcaacaccggtgccggcggcggatcgggcatcggcaacttgggtgcgggcgtgtcgggcctgctcaaccaggccggcgcggggtcactggtggggacactctcggggctgggcaatgccggcaccctggcctcgggtgtgctgaactccggcaccgccatctccgggctgttcaacgtgagcacgctggacgccaccaccccggcggtgatctcggggttcagcaacctcggcgaccatatgtcgggggtgtccatcgatggcctgatcgcgatcctcaccttcccacctgccgagtccgtgttcgatcagatcatcgacgcggccatcgccgagctgcagcacctcgacatcggcaacgctttggccttgggcaatgtcggcggggtgaacctcggtttggctaacgtcggtgagttcaacctgggtgcgggcaacgtcggcaacatcaacgtcggcgccggcaacctcggcggcagcaacttggggttgggcaacgtcgggaccggcaacctcgggttcggcaacatcggtgccggcaatttcggattcggcaacgcgggcctgaccgcgggcgcggggggcctgggcaatgtggggttgggtaacgccggcagcggcagctgggggttggccaacgtgggtgtgggcaatatcgggttggccaacaccggcaccggcaacatcgggatcgggctgaccggggactatcggaccgggatcggcggcctgaactcgggcaccgggaacctcgggttgttcaactcgggcaccggcaacatcgggttcttcaacaccgggaccgggaacttcgggctgttcaactcgggcagttacagcaccggtgtggggaatgcgggcacggccagcaccgggttgttcaacgcggggaacttcaacaccggtctggccaatgccggctcctacaacaccggcagcctcaacgtgggcagcttcaacaccggcggcgtcaacccgggcaccgtcaacaccggctggttcaacaccggccacaccaacaccggcctgttcaacaccggcaacgtcaacaccggcgcgttcaactccggcagcttcaacaacggggcgctgtggaccggtgactaccacgggctggtcggcttctccttcagcatcgacatcgccggcagcaccctgctggacctcaacgaaaccctcaacctgggccccatccacatcgagcagatcgacatccccggcatgtcgctgttcgacgtccacgaaatcgtcgagatcggacccttcaccatcccgcaggtcgatgttcccgcgataccgctagagatccacgaatcgatccacatggatcccatcgtcctggtgcccgccaccacaattcccgcacagacgagaaccattccgctggacatccccgcctcacccgggtcaaccatgacgcttccgctcatcagcatgcgcttcgaaggcgaggactggatcctcgggtcgaccgcggcgattcccaatttcggagaccccttcccggcgcccacccagggcatcaccattcacaccggccctggccccggaacgaccggcgagctcaagatatctattccgggtttcgagattccgcaaatcgctaccacgagattcctgttggacgtgaacatcagcggtggtctgccggccttcaccttgttcgcgggtggcctgacgatccccacgaacgccatcccgttaacgatcgatgcgtccggcgcgctggatccgatcacgattttcccgggtgggtacacgatcgacccgctgccgctgcacctggcgctgaatctcaccgtgcccgacagcagcatcccgatcatcgatgtcccgccgacgccagggttcggcaacaccacggcgaccccgtcgtcggggttcttcaactccggcgccggtggggtgtcggggttcggaaacgtcgggtcgaacctgtcgggctggtggaaccaggcggcgagcgcgctggcggggtcgggatcgggggtgttgaatgtcggcacgctgggctcgggtgtgctcaacgtcggctcgggtgtctcggggatctacaacaccagcgtgttgccgctcgggacgccggcggtgctgtcgggcctcggcaacgtcggccatcagctgtcgggcgtgtctgcggccgggaccgcgttgaaccagatccccatcctcaacatcgggttggcggatgtgggcaacttcaacgtcgggttcggcaacgtcggggacgttaacctgggcgcggccaacctcggtgcgcaaaacctggggctgggcaacgtcggcaccggcaacctcggcttcgccaacgtcggccacggcaatatcggtttcggcaattcgggtctgaccgccggcgcggccggcctgggcaacacggggttcggcaatgccggcagcgccaactatggtttcgccaaccagggcgtgcgcaacatcgggttggccaacaccggcaccggcaacatcgggatcgggctggtgggggacaacctcaccggcatcgggggcctgaactccggtgccggcaatatcggcttgttcaactccggcaccggcaacatcgggttcttcaactccgggaccggcaacttcggcatcggtaactcgggcagcttcaacaccggcatcggcaatagcggaacgggcagcactgggctcttcaatgccggcagcttcaacaccggcgtggccaacgccggcagctacaacaccggcagcttcaatgccggcgacaccaacaccggggggttcaacccgggcaccatcaacaccggctggttcaacaccggccacaccaataccggcatcgccaactcgggcaacgtcggcaccggcgcgttcatgtcgggcaacttcagcaacggcctgttgtggcggggtgatcacgagggcctgttcagcctgttctacagcctcgacgtgccccggatcaccatcgtggacgcccacctcgacggcggcttcggacccgtggtcctcccgcccatcccggtgccggccgttaatgcgcacctgaccggaaacgtcgcgatgggcgcattcaccattccgcagatcgacatccccgcactcaccccaaacatcaccggaagcgccgccttccgcatcgttgtggggtccgtgcgcattccgccggtgagtgtcattgtggagcaaataatcaacgcctcggttggggcggagatgaggatagatcccttcgaaatgtggactcaaggcactaatggccttggtataaccttctattcattcggatcggccgacggttcgccctacgccaccggcccactcgttttcggcgccggcacgagcgacggaagccatctcaccatttccgcgtccagcggggcgtttaccactccgcagctcgaaactggcccgatcacgttgggcttccaggtgcccggcagcgtcaacgcgatcaccctcttccccggtggtttgacgttcccggcgacctcgctgctgaacctggacgtgaccgccggcgccggcggcgtggacatcccggccatcacctggcccgagatcgcggcgagcgccgacggctcggtgtatgtcctcgccagcagcatcccgctgatcaacatcccgcccaccccgggcattgggaacagcaccatcaccccgtcgtcgggcttcttcaacgccggcgcgggcgggggatcgggcttcggcaacttcggcgcgggcacctcgggctggtggaaccaggcgcacaccgcgctggcgggggcgggctcgggttttgccaacgttggcacgctgcattccggtgtgctcaacctgggctcgggtgtctcggggatctacaacaccagcacgctgggggtggggaccccggcgctggtctcaggcctgggcaacgtcggccaccaactgtcggggctgctttccggcgggtccgcggtgaacccggtgaccgttctgaatatcgggttggccaacgtcggcagccacaacgccggtttcggcaatgtcggggaggtcaacctgggcgcggccaacctcggcgcgcacaacctgggcttcggaaatatcggcgccggcaacctggggttcggcaatattggccacggcaatgtcggagtcggcaactcgggtctgaccgcgggcgtgccgggcctgggcaatgtggggttgggcaatgccggcggcaacaactgggggttggccaacgtgggcgtgggcaatatcgggttggccaacaccggcaccggcaacattgggatcgggctgaccggcgactaccagaccggcatcggcggcctaaattccggtgccggcaacctggggttgttcaactccggcgccggcaacgtcgggttcttcaacaccgggaccggcaacttcgggttgttcaactccggcagcttcaacaccggcgtcggcaatagcggaacgggcagcactgggctcttcaatgccggcagtttcaacaccggtgtggccaacgccggcagctacaacacgggcagcttcaatgtcggtgacaccaacaccgggggcttcaacccgggcagcatcaacaccggctggctcaacgccggcaacgccaacaccggggtggccaacgcgggcaatgtcaacaccggcgccttcgtcaccggcaacttcagcaacggcatcctgtggcgcggcgactaccagggcctggccggcttcgccgtgggctacaccctcccgctgttccccgcggtgggcgccgacgtcagcggcgggatcggcccgattaccgtgctgccgcccatccacatcccgcccattccggtcggcttcgccgcggtcggtggcatcggcccgatcgccatcccggacatctctgttccatccattcacttgggcctcgaccccgccgtccatgtcggctccatcaccgtcaaccccattaccgtcaggaccccgcccgtgctcgtcagttactcccaaggagccgtcaccagcacgtccggaccaacctcagagatttgggtcaagcccagcttcttccccggaatccggatcgcgccctctagcggcgggggtgcaacgtccacgcaaggggcatactttgtggggcccatctccatcccctccggcacggtgaccttcccgggattcaccatccccctcgacccgatcgacatcggcctgccggtgtcgctgaccatcccggggttcaccatcccgggcggcaccctgatccccaccctcccgctgggcctcgcgttgtccaatggcatcccgcccgtcgacatcccggccatcgttctcgaccggatcttgctggacctgcacgccgacaccactatcggcccgatcaacgtcccgatcgccgggttcggcggggcgccgggtttcgggaactcgaccacgctgccgtcgtcgggcttcttcaacaccggagctggcggcggttcgggctttagcaacaccggcgcgggcatgtcgggattgctcaacgcgatgtcggatccgctgctcgggtcggcgtcgggcttcgccaacttcggcacccagctctccggcatcctcaaccgcggcgccggcatctcgggcgtgtacaacaccggcgcgctgggtgttgtcaccgcggccgtcgtctcgggtttcggcaacgtcggccagcaactgtcgggcttgctcttcaccggcgtcgggccctaa

SEQ ID NO: 475 - DNA, 582 bp, Mycobacterium Tuberculosis
gtggccttaaagcactctgaggcatccggcaccgcgtcgacgaagatcgtcatcgcgggcggattcgggtccggcaagaccacattcgtcggcgctgtttcggagatcatgccgttgcgcaccgaagcgatggtcaccgatgcctccgccggcgtcgacatgctggaggccactcccgacaagcggagcaccacggtggcgatggacttcggccgcatcaccttgggcgaggatctggtgctttatctattcggtaccccgggccagcgccggttctggttcatgtgggacgacctggtgcgtggtgccatcggggcgatcgtcttggtcgactgccggcgtctgcaggacagctttgcggcggtcgacttcttcgaacaccgcaacctgccgttcttgatcgccatcaacgagttcgacagcgcgccaaggtatccggttagcgcggtgcgcgacgcgttgacgctgcccgcacacattccggtgatcaatgttgacgcccgcaatcgcaggtcggcgaccgatgcactgatcgcggtgagcgaatacgcgctggccaccctgtctcctgcgggcggttga

SEQ ID NO: 476 - DNA, 393 bp, Mycobacterium Tuberculosis
atgaaagcccgcttgccggacagcccgcttgactggctggtgtcgaagttcgcccgcgaggttcccggggtggcccatgcattgctggtgtcggtcgacgggcttcccgtggcggccagcgaacatctaccacgcgaacgcgccgatcagttggccgcggtgacgtccgggctggccagcctggccggcggcgccgcgcaactgttcgacggcgggcaggtgctgcagtcggtggttgagatgcagaacggctacctgctgttgatgcaggtgggagacgggtcggcgctggcggcgctggccgcgaccggatgcgatatcggccagatcggttatgagatggccatccttgtcgagcgggtgggcggcgttgttcaatcctgccggcgatag

SEQ ID NO: 477 - DNA, 1767 bp, Mycobacterium Tuberculosis
atgtcgtttgtcgtagcagtcccggaggcattggcggcggccgcgtcggatgtggcgaacatcggttctgcgctaagtgccgcgaatgcagcggcagccgccggcacaacggggctactggcagccggtgccgacgaggtctcggccgccctggcgtcgctgttttccgggcacgctgtgagctaccaacaggtcgcggcccaggcgacggcgttacacgatcagtttgtccaggccttgaccggtgccggcggatcgtacgccctcaccgaggccgccaacgtccagcagaatctgctgaacgcaattaacgcgcccactcaggcgctgttggggcgcccgttaattggcgacggggctgtcggcaccgccagcagccccgacgggcaagatggcggtctgctgttcggcaacgggggcgccggctacaacagcgccgccacgcccggaatggccggcggcaacggcggcaacgccggattgatcggcaacggcggtactggcgggtcgggcggtgccggcgcggccggtggcgccggcggcagcggcggctggttgtacggcaacggcggaaacggcggcatcggcgggaatgcgatcgtcgcgggcggtgccggcggcaatgggggcgctggcggcgccgccggattgtggggcagtggcggcagcggcggccaaggcggcaacggtctgaccggcaacgacggcgtgaatccggcccccgtcacaaaccccgcgctaaatggcgccgccggcgacagcaatatcgagccgcaaaccagcgtcctgatcggcacccaaggcggtgacggcacgcccgggggtgctggcgtcaacggcggcaacggtggcgcgggcggagacgccaatggcaaccccgcaaacacctcgatcgccaacgcaggcgccggcgggaacggcgccgccggcggtgacggcggtgccaatggcggtgcgggcggcgccggcgggcaggccgcgtccgccggtagttccgtcggcggtgacggcggcaacggcggtgccggcggtacgggcacgaacgggcacgccggcggtgcgggcggcgccggcggtgccggtggtcgcggcgggtggctggtcggcaacggtggcaacggtggcaacggtgccgccggcggcaacggcgccatcggcggtaccggtggtgccggcggcgtccccgccaaccagggcggtaacagcgccctaggcacccagccggtcggcggcgacggcggcgacggcggcaacgggggcaccggaggcaccggcgggcgtggcggcgacggcggatccggcggcgcgggcggcgcgagcggttggttgatgggcaacggcggcaacggcggcaacggcggcaccggcggctcaggcggtgtcggcggcaatggcggcatcggcggtgacggcgccggcggcggaaacgccacgagcacgtcgagcatccccttcgacgcccacgggggtaacggcggcgctggtggcgacgctggtcacggcggaacgggcggcgacggcggtgacggggggcatgccggcaccggtggacgtggcgggttactggccggccagcacgccaactccggcaatggcggtggcggcggtaccggcggtgccgggggcacccatggcacccccggcagcggcaacgcaggcggcaccggcaccggtaacgctgacagcacaaacggcgggccaggcagcgacggcctcggcggggacgcgtttaacggcagtcgcggcaccgacggcaaccccggctaa

SEQ ID NO: 478 - DNA, 654 bp, Mycobacterium Tuberculosis
ttgagcattagcgcggttgttttcgaccgtgacggtgtgctcaccagctttgactggacacgtgccgaggaggatgtgcggcgaatcacgggcctaccattggaggagatcgaacgccgctggggtgggtggctcaacggattgactatcgacgacgcgttcgttgaaacccagccaattagcgagttcctctcgagcctggcgcgcgagctcgagctcggttcgaaggcaagagacgagctagtgcgcctcgactacatggcgttcgcccagggatatccagacgcgcgtccagcccttgaagaagcccggcgccgtggcctcaaggtcggtgttctcacaaacaacagcctgttggtcagcgcccgcagcctccttcagtgcgccgctctgcacgacctcgtcgacgtcgtgctgagttcgcagatgatcggagctgccaagcctgacccgcgggcctatcaagcgatcgcggaagccctcggcgtctcgacaacgtcatgcctgttcttcgacgacatcgccgactgggttgagggcgcacggtgcgcgggcatgcgcgcgtacctcgtggaccgttccggacaaactcgcgacggcgtcgttcgcgatttgtccagccttggagcgatcctggacggcgcgggaccatga

SEQ ID NO: 479 - DNA, 1053 bp, Mycobacterium Tuberculosis
atgggaggcgtattgactctggatgcggcttttctggggagtgtccctgctgaccttgggaaagcattgttagaacgggctcgagcggattgtggccctgtgctgcatcgggccattgagtcgatgcgcgagccgttggcgacgatggcgggatatcaccttggctggtggaacgccgatcgatccacagcggcaggatcgtcgggcaagtattttcgcgccgcccttgtctacgcggcggccgcggcttgcggtggtgatgtcggtgatgctactccggtgtcggcggctgtggagttggtgcacaacttcacgttgttgcatgacgatgtgatggatggggatgcgactcgcaggggacggccgacggtatggagtgtgtggggtgtgggcgtcgcgatcctgttgggagatgcgttgcacgccacggccgttcggatactgaccggcctgaccgacgagtgtgtggcggtcagggcgataaggcgattgcagatgtcgtgcctggacttgtgtatcggccagtttgaggattgtttattggagggacagcccgaagttacagtcgatgactatctgcggatggccgcgggcaagacggccgccctgaccggttgttgttgcgctctgggagctttagtggccaatgcagacgacgcgacgattgctgcgttggagcgttttggccatgagttgggtcttgcgtttcaatgcgtcgacgatctgatcggcatctggggtgaccctggtgtgacgggaaagccggtcggcaacgaccttgcccgacgtaaggcgacactgccagttgttgccgccctgaactcgcgatccgaagcggcgaccgaattggcggccctctatcaagcacctgccgcaatgacagcaagcgatgtcgagcgggctaccgcgcttgtcaaggtggccgggggtggtcatgtggcgcagcgatgcgccgatgaacgcatccaggctgctattgcggcactgcccgatgcggtgcgatccccagacctgatcgcgttgtcgcaactgatatgtcgccgggagtgctga

SEQ ID NO: 480 - DNA, 393 bp, Mycobacterium Tuberculosis
atggcggccatctatctcgactcgtccgcgatcgtcaagctcgcggttcgcgagccagagtcggacgcgctgcgccgctaccttcgcacccgccacccgcgagtgtcgagtgcccttgcgcgcgcggaggtcatgcgggccctgcttgacaagggtgaatcagcgcggaaagccggccgccgggcgctggctcatctcgatctgctgcgcgtcgacaagcgcgtcctcgatctcgctggtgggctgctgccattcgagctgcgcacgctcgatgccatccacttggcgacggcgcagcggctcggcgtcgatctgggccggttgtgcacctacgacgaccggatgcgcgacgccgccaagacgctcggcatggccgtgatcgccccgtcgtga

SEQ ID NO: 481 - DNA, 705 bp, Mycobacterium Tuberculosis
gtgtttcgtactgtaggcgatcaggcatcgttgtgggaatccgtgctgcccgaggagttgcggcggctgcccgaagagctggcccgggtggatgcgctgctcgatgattcggcgttcttctgcccgtttgtgccgttcttcgacccgcggatgggtcggccgtccataccgatggagacctatttgcggttgatgttcttgaagttccgttaccggttgggctatgagtcgctgtgtcgggaggtcaccgattcgatcacctggcggcggttctgccgtattccgttggagggatcggtgccgcacccaaccacgttgatgaagctgaccacgcgctgcggtgaggatgcggtggccgggctcaatgaggcgctgctggccaaggcggccagcgaaaagctgttgcgcaccaacaaggtccgtgccgacaccaccgtggtggagggcgatgtgggctatcccaccgacactggactgctcgccaaggcggtcggctcgatggcgcgcaccgtggcgcggatcaaagccgcggacgcgggatcggcgccgctcggtgggtcgtcgggcccgcgcgatcgcctccaagctgcggttacgcggcgcgcagcaacgcgatcaggcgcaggccttcgtgcgccggatcaccggggagctagccgggatcgccgagcaggcgctgaccgaggctgccgcggtggtacgtaa

SEQ ID NO: 482 - DNA, 873 bp, Mycobacterium Tuberculosis
atggcgattgatccgaactccataggtgcagtgaccgagccgatgttgttcgagtggaccgaccgggacacgctgctttacgcgatcggggtgggcgccgggaccggagatctggcgttcaccacggagaacagccacggcatcgaccagcaagtgttgccgacgtatgcggtgatttgctgtccggcgtttggtgcggccgcaaaggtgggaacattcaacccggcggcgctgctacacggctcccagggcatccggctgcatgcgccgctgccggcggcgggaaaactgtcggtggtcaccgaggtcgccgacatccaggacaagggggagggcaagaacgccatcgttgtgctgcgcggccgcggttgcgacccggaatcgggttcgttggttgccgaaacgcttaccacgttggtgcttcggggtcaggggggtttcggaggagcgcggggtgagcggccggccgcgccggaatttccggaccgccaccccgacgcccgaatcgatatgccgacccgtgaggaccaggcgctgatctaccggctctccggtgaccgcaacccgctgcacagcgacccctggttcgccacgcagctggccgggtttcccaagccgatcctgcacgggttgtgcacctacggggtggcgggccgggcgctggtggccgagcttggcggcggtgtggcggccaacatcacctcgatcgccgcgcggttcaccaagccggtgtttcccggcgagacgctgtcgacggtgatctggcgcaccgagccgggccgggcggtgttccgcaccgaggtggccggctccgacggcgccgaggcccgggtggtgctcgacgacggcgcggtggagtacgtggcgggttag

SEQ ID NO: 483 - DNA, 1239 bp, Mycobacterium Tuberculosis
atgaagatccgaacgttatccggctcggtgctggagccgccgtccgcagtacgcgcgaccccaggcacgtccatgttaaaactcgagccgggtggctcgacgatccccaagatccccttcatccgcccgagctttcccgggccagccgagctcgccgaggacttcgtacagatcgcccaggctaactggtacacgaacttcggtccgaacgagcggcggtttgcccgcgccctgcgcgactatctgggacctcatctgcacgttgctaccctcgccaacggcaccctggcactcctcgcggcgctccacgtcagtttcggcgccggtacgcgggaccgctacctgctgatgccgtcgttcacgttcgtcggcgtggctcaggctgcgctatggactgggtaccgtccctggttcatcgacatcgacgccaacacatggcagccatgcgtccactccgcccgcgccgtcatcgaacgcttccgcgaccggatcgccggcatcctgctggccaatgtgttcggcgtcggcaatccccagatcagcgtctgggaggagctcgccgccgaatgggagctaccgattgtgctcgactcggcggccggcttcggctccacgtacgccgacggcgagcgcctcggtggacgcggtgcatgcgagatcttctccttccatgcgaccaagccgttcgcggttggtgagggcggcgctctggtttctcgcgatccacggctcgtcgagcacgcatacaagttccagaacttcggcttggtgcaaacacgcgagtccatccagctcggaatgaacggcaagctgtcggagatcagcgccgctattggcctacgccaactagtcgggcttgatcgccgcctggcaagtcgccgcaaggtcctcgagtgctatcgcaccggtatggccgacgcgggtgtgcgtttccaggacaacgccaatgttgcgtcgctctgtttcgcgagcgcttgctgcacgtccgccgaccacaaggccgcggttctgggtagcctgcgtaggcacgcgatcgaggcgcgcgactactacaacccaccgcagcaccgacatccgtactttgtgacgaatgccgagttagtcgagtcgaccgatctagccgtcacggcggacatttgctcgcgaatcgtgtcgctgccagtccacgaccacatggccccggatgacgttgcccgggtcgtcgccgccgtgcaggaagcggaggtgcgcggtgaatga

SEQ ID NO: 484 - DNA, 300 bp, Mycobacterium Tuberculosis
atgcgtgctaccgttgggcttgtggaggcaatcggaatccgagaactaagacagcacgcatcgcgatacctcgcccgggttgaagccggcgaggaacttggcgtcaccaacaaaggaagacttgtggcccgactcatcccggtgcaggccgcggagcgttctcgcgaagccctgattgaatcaggtgtcctgattccggctcgtcgtccacaaaaccttctcgacgtcaccgccgaaccggcgcgcggccgcaagcgcaccctgtccgatgttctcaacgaaatgcgcgacgagcagtga

SEQ ID NO: 485 - DNA, 900 bp, Mycobacterium Tuberculosis
atgcgtgaatttggtaatccccttggcgatcggccgccattggatgagctggcccgcaccgatctgctgctcgacgcactcgccgaacgggaggaggttgacttcgcggatcctcgcgatgacgcgttggccgccctgctcggacagtggcgcgacgacttgaggtggccgccggccagtgccctggtttcacaggacgaggccgtcgccgcgttgcgcgccggggtagcgcaacggcgacgggctcgtcgcagcctggcggccgtcgggtcggtggccgcggcgctgttggtgctgagcgggttcggcgccgtggtggccgatgctcgccccggggacctgttgtacggcctgcacgcgatgatgttcaaccgatcgcgggtcagcgacgatcagatcgtgctgtcggccaaggccaatctggcgaaggtcgagcaaatgattgcccaaggccaatgggccgaggcgcaggatgagctggctgaggtcagcagcaccgtgcaggccgtgactgacggtagccgccggcaggacctgatcaacgaggtgaacctgctgaataccaaggtggagacgcgcgacccgaacgccacgctgcggcccggctcgccgtccaaccctgcggctccgggttcggtgggaaactcgtggactccgctggctccagtcgtcgagccgccgacccccccgacgcctgcatcggcagctgaaccgtcgatgtcggcaggcgtctcggagagccccatgccgaactccacgtccacggtggcagccagccccagcacgccgtcatcaaaacccgagccgggctcaattgacccctcgttggaacccgccgacgaggcgacgaatccggcggggcagccagcaccggaaacgccggtgagtccgacgcactag

SEQ ID NO: 486 - DNA, 1620 bp, Mycobacterium Tuberculosis
atgagcaagctgatcgaatacgacgaaaccgcgcgtcgcgccatggaggtcggcatggacaagctggccgacaccgtgcgggtgacgctggggccgcgcggccggcatgtggtgctggccaaggcgtttggcggacccacggttaccaacgacggcgtcacggtggcacgtgagatcgagctggaagatccgtttgaagacttgggcgcccagctggtgaagtcggtggccaccaagaccaacgatgtggccggtgacggcaccaccaccgcaaccatcttggcgcaggcactgatcaagggcggcctgaggctagtggccgccggcgtcaacccgatcgcgctcggcgtgggaatcggcaaggccgccgacgcggtatccgaggcgctgctggcatcggccacgccggtgtccggcaagaccggcatcgcgcaggtggcgacggtgtcctcgcgcgacgagcagatcggtgacctggttggcgaagcgatgagcaaggtcggccacgacggcgtggtcagcgtcgaagaatcctcgacgctgggcaccgagttggagttcaccgagggtatcggcttcgacaagggcttcttgtcggcatacttcgttaccgacttcgataaccagcaggcggtgctcgaggacgcgttgatcctgctgcaccaagacaagatcagctcgcttcccgatctgttgccattgctggaaaaggttgcaggaacgggtaagccactactgatcgtggctgaagacgtggagggcgaagcgttggcgacgctggtcgtcaacgcgattcgcaagacgttgaaagcggtcgcggtcaaggggccgtacttcggtgaccgccgtaaggcgttccttgaggacctggcggtggtgacgggtggccaggtggtcaaccccgacgccggcatggtgctgcgcgaggtgggcttggaggtgctgggctcggcccgacgcgtggtggtcagcaaggacgacacggtcattgtcgacggcggcggcaccgcagaagcggtggccaaccgggcgaagcacttgcgtgccgagatcgacaagagcgattcggattgggatcgggaaaagcttggcgagcggctggccaaactggccggcggggttgctgtcatcaaggtgggtgccgccaccgagaccgcactcaaggagcgcaaggaaagcgtcgaggatgcggtcgcggccgccaaggccgcggtcgaggagggcatcgtccctggtgggggagcctcgctcatccaccaggcccgcaaggcgctgaccgaactgcgtgcgtcgctgaccggtgacgaggtcctcggtgtcgacgtgttctccgaagcccttgccgcgccgttgttctggatcgccgccaacgctggcttggacggctcggtggtggtcaacaaggtcagcgagctacccgccgggcatgggctgaacgtgaacaccctgagctatggtgacttggccgctgacggcgtcatcgacccggtcaaggtgactaggtcggcggtgttgaacgcgtcatcggttgcccggatggtactcaccaccgagacggtcgtggtcgacaagccggccaaggcagaagatcacgaccatcaccacgggcacgcgcactga

SEQ ID NO: 487 - DNA, 303 bp, Mycobacterium Tuberculosis
gtggcgaaggtgaacatcaagccactcgaggacaagattctcgtgcaggccaacgaggccgagaccacgaccgcgtccggtctggtcattcctgacaccgccaaggagaagccgcaggagggcaccgtcgttgccgtcggccctggccggtgggacgaggacggcgagaagcggatcccgctggacgttgcggagggtgacaccgtcatctacagcaagtacggcggcaccgagatcaagtacaacggcgaggaatacctgatcctgtcggcacgcgacgtgctggccgtcgtttccaagtag

SEQ ID NO: 488 - DNA, 3711 bp, Mycobacterium Tuberculosis
atgaattcagggccggcgtgcgcgactgcggacatcctggttgccccgccgcccgagttgcggcggtcggaaccgtccagcctgctgattcgcctgctcccggtcgtcatgtcggtggcgaccgtgggtgtcatggtgacggtgttcttgccgggctcgccggccacgcgccaccccacgtttctggccttcccaatgatgatgctggtctcgttggtggtgactgcggtaaccggacgcggccggcggcatgtctccggtatccacaacgaccgtgtcgactacctcgggtacctgagtgtcttgcgcacatctgtcacccaaacggctgcagcacaacacgtatcactgaactggacgcatcccgatcctgccaccttgtggacattgatcggtggtccgcgaatgtgggagcgtcgaccgggtgctgccgacttctgtcgcatccgtgtcggagttggatctgcaccgctggccacccgcttggtggtcgggcagcttccgccggcgcagcgtgcggatccggtcacccgcgccgcgctgcgctgtttccttgccgcacacgcgaccattgcggatgcgcccatcgcgatccccttgcgggtcggcggtccgatcgccatcgacggtgacccgaccaaggtccgcgggctgctgcgggcgatgatctgccagctggccgtatggcactcaccggaggagttgctgatcgccggcgtggtcagtgaccgcaaccgcgcgcactgggattggctgaaatggctgccgcacaaccaacatccgaatgcctgtgatgccttggggccagccccgatggtgtactcgaccctggcagagatgcaaaatgcgctagccgcaacggtattggcccacgttgttgcgatcgtcgacacggccgaacgtggcaacggcgcgatcaccggcgtgatcacgatcgaggtgggcgccagacgagacggtgcaccgccggtggtcagatgtgccggcgaagtgacagcgctagcgtgcccggaccagctggagcctcaagacgcgctggtatgcgcccgtcggctggccgctcaccgggtcgggcactcgggtcgcacgttcatccgtggctcgggttgggcggaactggtcggcatcggcgatgtggccgctttcgatccgagcacgttgtggcgcaacgtaaaccaacatgatcggctccgtgtcccgatcggagtcacgcccgacggtaccgccgtgcagctagacatcaaggaagccgcggaacagggcatgggtccacacgggctgtgcgtcggcgccaccggatcaggcaaatcggagctgctgcgtaccatcgcgctggggatgatggcacgcaattcgcccgaagtcctcaacctccttctggtcgacttcaagggtggtgcaacatttctcgacctcgcgggagccccacatgtagccgcggtcatcaccaaccttgccgaggaagcaccgctggtcgcacggatgcaagacgcattggccggcgagatgagccgccggcaacagctgctgcggatggcaggccacttggtcagtgtcacggcatatcagcgggcacgccaaacgggtgcgcaacttccctgcctgccgatcctgttcatcgtcgtcgacgagttttccgaattgctgagccaacatcccgaattcgtcgacgtgttcctcgcgatcggtcgggtgggccggtcgctgggcatgcatttgctgctggccagtcagcggctcgacgagggccgactgcgtggactggaaacccatctgtcctatcgaatgtgcctgaaaacgtggtccgccagtgaatcacgcaacgtgctcgggacgcaggacgcatatcaactgcccaacacccccggtgcgggcttgctgcaaacgggaaccggagagctgatccgatttcagaccgcgttcgtttccgggccgcttcgacgggcgagtccctcagcggtccacccggtagccccgccgtcggtgcgaccgttcaccacgcacgctgcggcgccggtcacagccggtcccgtcggcgggacagccgaggtgcccacgcctaccgtcttgcatgcggtgctcgaccggctggtcggtcatggaccggctgcgcatcaagtctggctaccgccgctggacgagccaccgatgctgggcgccctactgcgtgacgctgagccggcgcaggccgagctggccgtacccatcggcattgtcgatcggccgttcgagcagtcacgggtgccgctgacgatcgacttgtccggggccgcaggcaatgtcgcggtcgtaggtgcaccgcaaacgggcaagtcaaccgcgctgcggacgctgatcatggcgttggctgctacccacgatgcgggccgggtgcagttctattgtttggacttcggcggcggggcgctggcccaggtggacgaactgccgcatgtgggtgccgtggccggcagggcgcagccgcagctggcatcgcggatgctcgccgaactggagtcggccgtgcgatttcgggaggcattcttccgcgaccacggcatcgactcggtggcgcggtaccgccagctgcgagcaaagtcggccgctgagtcttttgcggacatatttcttgtcatcgacggctgggcaagcttacgccaggagttcgcggcccttgaggagtcgatcgttgccctggcagctcaagggctttcattcggcgtacatgtggcgctatcggcagcacggtgggcggagatcaggccgtcgctgcgggatcagatcggcagtcgaatcgagttacggctggcggatcccgcggattccgaattggaccgtaggcaggcgcaacgggtgccggtcgacagaccgggccgtggcctctcccgcgacgggatgcacatggtgatcgccctgcccgacctggatggagttgcgctacgacgccgaagtggtgatccggtggcgcccccgataccgctactgcccgcgcgcgtggactacgacagcgtcgtggcccgagccggcgacgaactcggtgcgcacatcttgctcggcctcgaggaacgtcgaggccagccggtggccgtcgatttcggacgccacccgcacctgctggtgctgggcgacaacgagtgcggaaagacggccgcgttgcggaccctgtgccgcgagatcgtccggacccataccgccgcgcgagcccaacttctcatcgtcgacttccggcacaccctgctcgacgtcatcgagtcggaacatatgagcggctacgtcagctcgccggcggcgctgggtgccaagctgtcgagtctggtcgacctgctccaggcgcggatgcccgccccggatgtgagccaggcgcagctgcgagccaggtcctggtggtcgggtccggatatctatgtcgtggtcgacgactacgacctggttgcggtctcatcgggcaacccgctgatggtcttgctcgaatatttgccgcacgcaagagatctcggtttacacctggtggtggcgcggcgcagcgggggtgctgctcgggcgctgttcgagccggtgcttgccagcctgcgtgacctgggctgccgggcactgctgatgagcggacgtccggatgaaggcgcactgttcgggtcgagccgcccgatgccgctgccaccgggccggggcatcctggtcaccggtgccggtgacgagcaactggttcaagtcgcctggagcccacccccgtga

SEQ ID NO: 489 - DNA, 771 bp, Mycobacterium Tuberculosis
gtggggcagcgcacggtcgcgggcgatctcgatgcggcgctgactaccatcttccgcaccccggtgcggctgcgggcggccggacgcactgatgcgggcgtgcacgccagcggccaggtcgcccacgttgacgtgcccgccgatgccttgccgaacgcttacccgcgcgccggccacgtcggtgatccggaattcctgccgctgttgcggaggctgggtcgatttctgcccgccgacgttcgaatcctcgatatcacgcgcgcaccagcgggtttcgacgccagattctcggcgctgcggcggcattacgtgtaccggctgtcgacagcaccctacggtgtcgagccgcagcaggcgcgctacatcaccgcttggccacgcgagcttgatctggatgcgatgacggccgcgtcgcgagatttgatggggctgcacgacttcgcggcgttctgccgtcatcgcgagggcgccaccacgattcgtgatctgcagcggctggactggtcgcgtgccggcaccctggtcaccgcgcacgtcaccgccgacgcgttctgttggtcgatggtgcggtcgttggtgggggcgctactggcggtcggcgagcaccgtcgcgcgacaacttggtgtcgtgagctgctcaccgcgacaggacgatccagcgacttcgcggtcgcgccggcgcacgggttgacgttgatccaggtggactatccgcccgatgaccagctcgcgtcacggaacttggtcacccgggatgtgcgctcgggctaa

SEQ ID NO: 490 - DNA, 543 bp, Mycobacterium Tuberculosis
atgcccaagcctaccaagggccctcgcctcggcgggtcgtcttcacatcagaaggcgatcttggccaacctcgccacgtccctgttcgagcatgggcggatcacgacgaccgagccgaaggcccgggcgctgcgtccgtacgcggagaagctgatcacgcatgccaaaaaaggcgcgttgcacaaccggcgcgaggtgctcaagaagctccgtgacaaggatgtggtgcataccttgttcgccgagatcggaccgttcttcgccgaccgcgatggtggctacacccgtatcatcaaaatcgaggcacgtaagggcgacaacgctccgatggccgtgatcgaactggtccgggagaagacggtgacctcggaggccaatcgagcacgccgggtagctgccgcgcaggcgaaggccaagaaggcggcggccatgccgaccgaggagtccgaggccaagcctgctgaggagggtgacgtggtcggcgccagtgagcctgacgcgaaggcccccgaagagccccccgcagaggcccccgagaattag

SEQ ID NO: 491 - DNA, 1044 bp, Mycobacterium Tuberculosis
atgctgatctcacagcgccccaccctgtccgaggacgtcctcaccgacaaccgatcccagttcgtgatcgaaccgctggagccgggattcggctacaccctgggcaattcgctgcgtcgcaccctgctgtcgtcgattcccggagcggccgtcaccagcattcgcatcgatggtgtactgcacgaattcaccacggtgcccggggtcaaagaagatgtcaccgagatcatcctgaatctcaagagcctggtggtgtcctcggaggaggacgagccggtcaccatgtacctacgcaagcagggtccgggtgaggttaccgccggcgacatcgtgccgccggccggcgtcaccgtgcacaaccccggcatgcacatcgccacgctgaacgataagggcaagctggaagtcgagctcgtcgtcgagcgtggccgcggctatgtcccggcggtgcaaaaccgggcttcgggtgccgaaattgggcgcattccagtcgattccatctactcaccggtgctcaaagtgacctacaaggtggacgccacccgggtcgagcagcgcaccgacttcgacaagctgatcctggacgtggagaccaagaattcaatcagcccgcgcgacgcgctggcgtcggctggcaagacgctggtcgagttgttcggcctggcacgggaactcaacgtcgaggccgaaggcatcgagatcgggccgtcgccggccgaggccgatcacattgcgtcattcgccctgccgatcgacgacctggatctgacggtgcggtcctacaactgcctcaagcgcgagggggtgcacaccgtgggcgaactggtggcgcgcaccgaatccgacctgcttgacatccgcaacttcggtcagaagtccatcgacgaggtgaagatcaagctgcaccagctgggcctgtcactcaaggacagcccgccgagcttcgacccctcggaggtcgcgggctacgacgtcgccaccggcacctggtcgaccgagggcgcgtacgacgagcaggactacgccgaaaccgaacagctttag

SEQ ID NO: 492 - DNA, 690 bp, Mycobacterium Tuberculosis
atgcgaggattgctgcccgtggcaggtcattgggtctccgtgctcaccgggctcgtgccgctggcgttggtcattgcgctctcgccgttgtcggtgatcccagcggtactggtcgtacactcgccgcagccgcggccgagcagcctggccttcctgggcggctggctgttgggcttggccgtggtgaccgccgtctttgttgcggcctccggcgcacttggcggtttgagcacaacatcgccggcctgggcatcctggctacgggtggtcctcgggtcggcactgatcgtgttcggcgtgcttcggtggctgacccggcatcgccacaccgaaatgccgggctggatgcgcgcattcgccagcttcaccccggcacgcgccggattggtaggggccgtgctggtggtggtgagacccgaggtgctgatcatttgcgcggcggccggattggccatcggcagcggcggccacggcgccgcgggttcctggatttacacggcattctttgccatgttggctgcatccacggtcgcgatcccgatattggcctacgtggctgccggtgaccgactcgacgattcgctggaacgacttaaagactggatggagaagaaccatgccgggatggtcgcggccattctggtcgtgatcggtttactgctgctctacaacggagttcacgcgatgtga

SEQ ID NO: 493 - DNA, 1695 bp, Mycobacterium Tuberculosis
atgatcgaccgactcgccaagatccagttgtccatttttgcggtgatcaccgtcatcaccctgagcgtgatggcgatcttttatctgcgtctgcccgccacgttcggcatcggaacctacggcgtgagtgccgacttcgtcgcgggcggtggcctgtacaagaacgccaacgtcacctaccgcggtgtcgcggtcgggcgggtggagtcggtggggctaaatcccaatggcgttaccgcgcacatgcgactgaacagtggcaccgccattccgtcgaacgtcaccgccaccgtacgcagcgtttcggccatcggtgagcagtacatcgacctagtgccgccggagaacccgtcgtcgaccaagttgcgcaacggcttccggatccagcggcagaacacccgaatcgggcaagacgtcgccgacctgttgcgtcaggccgagacgctgctcggcagccttggcgacacccggctgcgggagctgctgcacgaggcgttcatcgcgaccaatggcgccggtccggaactggcccggctgatcgagtcggcccggttgctggtggatgaggccaacgccaactatccacaggtttcgcagttgatcgatcaggccggcccgttcctgcaagcccagatccgcgccggcggggacatcaagtcactcgccgatgggctggcgcggttcacctggcagctccgtgcggcagacccgcggctgcgcgacacgttggccgacgccccggatgcgatcgacgaggccaacaccgcgttctccgggattcgtccttcgtttcccgcgctggcggccagtctggccaacctgggccgggtgggcgtgatctatcacaagtcgatcgaacagctcctggtggttttcccggcgctgttcgccgcgatcatcacctcggcgggcggcgtaccccaggacgagggcgccaagctggacttcaagatcgacctgcacgacccgccgccctgcatgaccgggttcttgcccccgccgctggtccggtcgccggccgacgagtcggtacgcgagattccccgggacatgtactgcaagaccgcgcagaacgacccgagcacggtgcgcggcgctcgcaactacccgtgccaggaattccccggtaagcgggcaccgacggtgcagttatgtcgggatccgcgtggctatgtgccagttggaaccaacccgtggcgcggtccgccgatcccgtacggcaccgaggtgacggatgggcgaaacattctgccgcccaacaagttcccttacatcccgccgggcgcggatcccgacccgggcgtgcccatcgtcggaccgccgccacccggccaggtggccggccccgggccggcgccgcaccagccggcgcagcctgcgccgccgcccaacgacaacggtccgcctccaccgttcacgtcatggatgccgcccgggtacccgccggagccaccccaggtgccatacccggcgaccattccgccgccgccaccaccggaaggcaccgggcctccgcccgggccggcgcctggcccccaaccgcaggccagcggtccggcctacaccatctatgaccaactcagcggagccttcgcggacccggccggcggcactggtatcttcgcgcccgggatgacgggcgcatccagcgccgagaattgggtggatctcatgcgcgatccgaggcagctgtag

SEQ ID NO: 494 - DNA, 5706 bp, Mycobacterium Tuberculosis
atgtcgttcgtgttgatcgcaccggaattcgtgacagcagccgcgggggatctgacgaatctgggttcgtcgattagcgcggccaacgcgtcggcagccagtgcgaccacgcaggtgctggctgcgggcgccgatgaggtgtctgcccgtattgcggcgctgttcggcgggtttggcctggagtaccaggcgattagtgcgcaggtggcggcctaccaccagcggtttgtgcaggccttgagtaccggcgcgggcgcatatgcctcggccgaggccgccgccgctgagcagatcgtgctgggcgtgatcaatgcgcccacccaggcgctgctggggcgcccgttgatcggtgacggcgccaatgcgacgactcccggcggggccggcggggccggcggtctgctgttcggcaacggcggggccggggcagccggggcgcccggccaggccggcgggcctggcgggcccgccggattgtggggcaacggcgggcccggcggggccggcggcagcggtgggggcaccggcggtgccggcggcgccggtgggtggctgttcggggttggcggcgccggcggtgtcggtggggccggtggcggcaccggcggggcgggcgggcccggtggtttgatctggggcggcggcggggccggcggtgtcggtggggccggtggcggcaccggcggggccggcggccgcgccgagctgctgttcggcgccggcggtgcgggtggggcgggcaccgacggcgggcccggtgctaccggcgggaccggcggacacggcggagtcggcggcgacggcggatggctggcacccggcggggccggcggggccggcgggcaaggcggggcaggtggtgccggcagcgatggtggcgcgttgggtggtaccggcgggacgggcggtaccggcggcgccggtggcgccggcggtcgcggcgcactgctgctgggcgctggcggacagggcggcctcggcggcgccggcggacaaggcggcaccggcggggccggcggagatggcgttctggggggtgtcggtggcactggtggtaagggcggtgtcggcggcgtggctggcctcggcggggccggtggtgccgcgggccagctcttcagcgccggaggcgcggcgggtgccgttggggttggcggcaccggcggccagggtggggctggcggtgccggagcggccggcgccgacgcccccgccagcacaggtctaaccggtggtaccgggttcgctggcggggccggcggcgtcggcggccagggcggcaacgccattgccggcggcatcaacggctccggtggtgccggcggcaccggcggccaaggcggcgccggcggcatgggtggctccggtgctgataatgccagcgggattggcgccgacggcggcgcgggtgggactggcggtaacgccggcgccggcggggccggcggggccgccggcaccggaggaaccggcggggttgtcggcgccgcgggcaaggccggtatcggcggcaccggcggccaaggcggcgccggcggcgcgggcagcgccggcacggatgcgaccgctaccggtgccaccggcggcaccgggttttccggtggagccggcggggccggcggggccggcggcaacaccggggttggcggcaccaacggctccggcgggcaaggcggcaccggcggcgcgggcggcgccggtggtgctggcggtgtcggcgccgacaaccccaccggcatcggcggcaccggcggcaccggcgggaaaggcggcgccggcggggccggcgggcagggcggtagcagcggtgccggcggcaccaacggctctggtggcgctggcggcaccggcggacaaggcggcgccgggggcgctggcggggccggcgccgataaccccaccggcatcggcggcgccggcggcaccggcggcaccggcggagcggccggagccggcggggccggtggcgccatcggtaccggcggcaccggcggcgcggtgggcagcgtcggtaacgccgggatcggcggtaccggcggtacgggtggtgtcggtggtgctggtggtgcaggtgcggctgcggccgctggcagcagcgctaccggtggcgccgggttcgccggcggcgccggcggagaaggcggagcgggcggcaacagcggtgtgggcggcaccaacggctccggcggcgccggcggtgcaggcggcaagggcggcaccggaggtgccggcgggtccggcgcggacaaccccaccggtgctggtttcgccggtggcgccggcggcacaggtggcgcggccggcgccggcggggccggcggggcgaccggtaccggcggcaccggcggcgttgtcggcgccaccggtagtgcaggcatcggcggggccggcggccgcggcggtgacggcggcgatggggccagcggtctcggcctgggcctctccggctttgacggcggccaaggcggccaaggcggggccggcggcagcgccggcgccggcggcatcaacggggccggcggggccggcggcaacggcggcgacggcggggacggcgcaaccggtgccgcaggtctcggcgacaacggcggggtcggcggtgacggtggggccggtggcgccgccggcaacggcggcaacgcgggcgtcggcctgacagccaaggccggcgacggcggcgccgcgggcaatggcggcaacgggggcgccggcggtgctggcggggccggcgacaacaatttcaacggcggccagggtggtgccggcggccaaggcggccaaggcggcctgggcggggcaagcaccacctcgatcaacgccaacggcggcgccggcggcaacggcggcaccggcggcaaaggcggcgccggtggtgcgggaaccctgggcgtcggcggctccggcggcaccggcggggacggcggcgatgcgggctctggtggtggcggcggcttcggcggggccgcgggtaaggccggcggcggcggaaacggcggccgcggcggtgacggcggcgatggggccagcggtctcggcctgggcctctccggctttgacggcggccaaggcggccaaggcggggccggcggcagcgccggcgccggcggcatcaacggggccggcggggccggcggcaacggcggcgacggcggggacggcgcaaccggtgccgcaggtctcggcgacaacggcggggtcggcggtgacggtggggccggtggcgccgccggcaacggcggcaacgcgggcgtcggcctgacagccaaggccggcgacggcggcgccgcgggcaatggcggcaacgggggcgccggcggtgctggcggggccggcgacaacaatttcaacggcggccagggtggtgccggcggccaaggcggccaaggcggcctgggcggggcaagcaccacctcgatcaacgccaacggcggcgccggcggcaacggcggcaccggcggcaaaggcggcgccggtggtgcgggaaccctgggcgtcggcggctccggcggcaccggcggggacggcggcgatgcgggctctggtggtggcggcggcttcggcggggccgcgggtaaggccggcggcggcggaaacggcggtgttggcggtgacggcggcgagggagccagcggtctcggcctgggcctctccggctttgacggcggccaaggcggccaaggcggggccggcggcagcgccggcgccggcggcatcaacggggccggcggggccggcggcaccggcggggccggtggtgacggcgccccggcgaccctgatcggcggacccgacggcggtgacggcggccaaggcggcatcggcggggacggcggcaacgccggattcggcgccggtgttcccggcgacggcggggacggcggcaacgccggattcggcgccggtgttcccggcgacggcgggatcggcggcaccggcggggccgggggcgccggcggcgccggcgccgacggggaccccagcattgacggcggccaaggtggtgccggcggccacggcggccaaggcggcaaaggcggcctgaacagcaccgggctagccagcgccgccagcggtgacggcggcaacggcggggccggcggggccggcggcaacggcggcgacggcgacggctttatcggcgggtccggcggcaccggcgggaccggcggcgacgccggcgtcggcggcctggccaacaccggcggaaccgcgggcaacgccggtatcggcggggccggcggccgcggcggcgacggcggggccggcgacagcggcgccctctcccaagacggcaacggcttcgccggcggccaaggcggccaaggcggggtcggcggcaacgccggcgccggcggcatcaacggggccggcggcaccggcggcaccggcggggccggtggtgacggccagaacggaacgacaggcgtggcgagcgagggcggcgccggcggccaaggcggtgacggcggccaaggcggcatcggcggggccggcggcaacgccggattcggcgccggtgttcccggcgacggcgggatcggcggcaccggcggggccgggggcgccggcggcgccggcgccgacggggaccccagcattgacggcggccaaggtggtgccggcggccacggcggccaaggcggcaaaggcggcctgaacagcaccgggctagccagcgccgccagcggtgacggcggcaacggcggggccggcggggccggcggcaacggcggcgacggcgacggctttatcggcgggtccggcggcaccggcgggaccggcggcgacgccggcgtcggcggcctggccaacaccggcggaaccgcgggcaacgccggtatcggcggggccggcggccgcggcggcgacggcggggccggcgacagcggcgccctctcccaagacggcaacggcttcgccggcggccaaggcggccaaggcggggtcggcggcaacgccggcgccggcggcatcaacggggccggcggcaccggcggcaccggcggggccggtggtgacggccagaacggaacgacaggcgtggcgagcgagggcggcgccggcggccaaggcggtgacggcggccaaggcggcatcggcggggccggcggcaacgccggattcggcgccggtgttcccggcgacggcgggatcggcggcaccggcggggccgggggcgccggcggcgccggcgccgacggggaccccagcattgacggcggccaaggtggtgccggcggccacggcggccaaggcggcaaaggcggcctgaacagcaccgggctagccagcgccgccagcggtgacggcggcaacggcggggccggcggggccggcggcaacggcggagccggcgggctcggcgggggcggtggcacaggcggcaccaacggcaacggcggcctcggcggaggcggcggcaacggcggagccggcggtgccgggggaacgcccaccggcagtggcaccgaggggaccggcggcgacggtggagatgccggcgccggcggcaacggcggctctgccaccggcgtcggtaacggcggtaacggcggtgatggcggcaacggcggcgacggcggcaacggcgcacccggcggcttcggtggcggcgctggcgccggcggcttgggcggctccggcgccggcggcggcaccgacggcgacgacggcaacggcggcagccccggcaccgacggcagctaa

SEQ ID NO: 495 - DNA, 3240 bp, Mycobacterium Tuberculosis
ccccaaggcgccgacggcaacgccggcaacggcggtgacggcggggtcggcggcaacggcggaaacggcgcagacaacaccaccaccgccgccgccggcaccacaggcggggccggcggggccggcggggccggcggaaccggcggaaccggcggagccgccggcaccggcaccggcggccaacaaggcaacggcggcaacggcggcaacggcggcaccggcggcaaaggcggcaccggcggcgacggtgcactcgcaggcagcagcggtggtgccggcggtaaaggcggcaacggcggcgacgccggcaaggccggtaccggctccgctcctggcacggcggggaccggcggcgatgggggtaagggcggcaacggcggcattggcgctgccggcacaaccggccccgtaggcaccggcgcgtccggcggcaccggtggtagtggtggcgccggcggaaccggcggtgacggcggcgccgccaacggcggcaccgccggggctggcggggcgggcggcaatggcggcaaaggcggcgacggtggagcaggcgtcaccagcagcaccgccggcaacagcggcggcgcgggcggcagcggcggaaagggcggagacgcgggcgcgggcggcgccggtgccactccgggcgccaacggtatcgctggcaatggcggcgacggcggagatggcgcggctggtgccgtcggcatctccggcgcaaccggcgctggcgacggcgggcatggcggaaccggcgcggccggcggcaacggtggaaccggcggtgctggcggtagcggcatcgacggcgtcggcggcgggaccggaggtaccggcggcaacggcggcaacggcgccatcggcggcgctggcggagacgccggtggtagcggaaatagcggcggaaacggtgggattggcggaaagggcggaaacgccggtgccggtggtgccgcgggcagcaacggcggtaccgtcggcgccaacggtaccggcggcgacggcggcaacggcggcgctgccggggccgccacggctggcagcaacggtggggccggcaccggctcggccggcggcaacggcggcaccggcggcagaggcggcagtggtggcgccggcggcgacggtatcggtggcgtcggcggcggcaagggcggcaacggcgcggacggcgaagtcggcggtgcgggcggcgccggcggcagcgggcccaacaccagtcccggcggcaacggcgggcaaggaggtcaaggcggcagcggtggtgccggtggggcggccggggctggcggcgccggtggcggcgctaacggcaccgctggcaacggcggccaaggcggtgccggcggcaccggcggcgccggcgcagcctcctcagctaccaacggcggcagcggcggcgccggcggcaccggaggcgacggcggcagcggcggcgccggcggcaccggaggcgccggcggcaccggcggggcggccggcgacggcggacaaggtggccagggcggcgccggcggcggtgccggtggtcaaggtggtgccggcggtgccggcgggaccggcggcaacggcggcaatatcaccggcggcaccgcgggcaccgcgggggccgccggtaacggcggcgccgccggaaagggtggcgccggcggccaaggcggcaccggtggcgggaccgggggtcagggtggcgccggcggcgacggcggtgccggcggcaccggcggcgaccgcaccgtcggcggtggcacggtccccgccggctccggtggacaaggcggtaacgctggcggtggtggggccggcgggcagggtggagccgacggcggcagcggcggcgacggcggcgacgccggcacaggtggcaatggcggtaacggcggcaaccgtaattccggcaatggcaccggcggcgctggcggcaacggtggtggtggtgctaacggtggcgccggcggcgctgggggcagcggcggcggcaccggcggcaacggcggcgctggcggcgacgccggcgacgccggcaacggcggcaacggcaacggcaccggcaacggcggcaacggcggcaacggcggcatcgccggcatgggcggcaacggcggtgccgggacgggcagcggcaacggcggcaacggcggcagcggcggcaacggcggcaacgccggcatgggcggcaacagcggcaccggcagcggcgacggcggtgccggcgggaacggcggcgcggcgggcacgggcggcaccggcggcgacggcggcctcaccggtactggcggcaccggcggcagcggtggcaccggcggtgacggcggtaacggcggcaacggagcagataacaccgcaaacatgactgcgcaggcgggcggtgacggtggcaacggcggcgacggtggcttcggcggcggggccggggccggcggcggtggcttgaccgctggcgccaacggcaccggcgggcaaggcggcgccggcggcgatggcggcaacggggccatcggcggccacggcccactcactgacgaccccggcggcaacgggggcaccggcggcaacggcggcaccggcggcaccggcggcgcgggcatcggcagccttggcggcggcactggcggcgatggcggcaacggcggcaacggcggtaccggcggcgagggcggcgaggtcggcggcgccggcggcaccggcggtgcggccggcaatggcggcgatggcggcaccggcggcaccggcggcggggacgggggcgccggcggcaccggcggcaccggcggcaccggcggcctcggcgacccccgggtcggcggatccggcggcgacggcggcaccggcggcagcggcggtgcggccggcaatggcggcaacggcggcaacgccggcgcgggaggcaatggcaacggcggcaccggtggggccggcggtatcggcggcaccggcggcaatggcggcgacgccgagcccggagtgcccccgggagccggtggtgctggcggcgccggcaccaccggcggcaagggtggcaccggcggcaacggcagtggcaccggctcgggcggcaccggcggcgatggcggcaccggcggtggtggtgggaacggcggcaccggctggaatggcggcaagggagacaccggcagcggcggtggcgccggagacggtggtaaggcaccagccggtggcaccggcggcgccggcggcgacggcggagcgggcggcaagggcggcagcggcggcgtctag

SEQ ID NO: 496 - DNA, 657 bp, Mycobacterium Tuberculosis
atggcggcatctttaagtgagaaccttagttgccactcatctaatatgtgccggctttctggtaatgccgcaacgaacctggagcgccctggggaggagccgcccggcgaccggtgcaccaggcgccaagcagtgcgacccgcgcgcacgctcgccaagaagggcaacattcccgtcggctactacaaggacgagaagaagacggccgagacgttccggacgattaacggtgtgcgctacgccattccgggggactacgcccaagtcgaggaggacggcacggtcaccatgctgggtcgtggctcggtgtcgatcaacagcggcggcgagaaggtctaccccgaagaggtcgaggccgctttgaaggggcatcccgacgtgttcgacgctctggtggtcggggtgcccgatccgcgttacggccagcaggtggccgccgtggtgcaggcccggccgggttgtcggccgtcgttggccgagttggactcgttcgtgcgctccgagatcgcgggctacaaagtgccgcgcagtctgtggtttgtcgacgaggtgaagcgttcgcccgccggtaagccggactaccgctgggccaaggagcagaccgaggcgcggccagccgatgacgtgcatgcgggacacgtgacgagcggttcctga

SEQ ID NO: 497 - DNA, 1647 bp, Mycobacterium Tuberculosis
gtggccgtggccctgaatattgccgatctcgccgagcacgccatcgacgccgtgcctgaccgtgtcgccgttatctgcggcgatgagcagttgacctacgcccagctggaggataaggccaaccgcctcgcgcaccacctgatcgatcaaggcgtgcaaaaggacgacaaggtcggcctgtactgccgcaaccgcatcgagatcgtgatcgcgatgctgggcatcgtgaaggcgggcgccatcttggtgaacgtcaacttccgttacgtggagggcgaacttcgctacctgttcgacaactccgacatggtcgcgttggtgcacgaacgccgctacgccgaccgggtcgccaacgttctccccgacacgccccatgtaaggacgatcttggtcgtcgaggacggctcggaccaggactatcggcgctacggcggcgtcgagttctattccgcgatcgcggcgggctcgccggagcgtgacttcggcgaacgcagcgccgacgccatctatctgctctacaccggcggcaccaccggtttccccaagggtgtgatgtggcgtcacgaggacatctatcgtgtgctgttcggtggaaccgactttgcgacaggagagttcgtcaaagacgaatacgacctggccaaggcggccgcggcgaatccaccgatgatccgctacccgatcccgccgatgatccacggcgccacccagtcggccacctggatggcgctcttctcgggccaaaccacggtactggcaccggaattcaacgccgacgaggtgtggcgcacgatccacaaacacaaggtgaacctgctgttcttcaccggtgatgcgatggcccgcccgctggtcgacgcgctggtcaagggcaacgactacgacctgtcgtcgttgttcctgttggccagcaccgcggcgctgttctcgccgagcatcaaggagaaactccttgagctgctgccgaatcgggtgatcacggactcaattggctcgtcggagacgggttttggcggtaccagcgtcgttgctgccgggcaggcgcatggcggcgggccccgggtgcggatcgaccatcgcaccgtcgtgctcgatgacgacggcaacgaagtcaagcccggctcggggatgcggggcgtcatcgccaagaagggcaacattcccgtcggctactacaaggacgagaagaagacggccgagacgttccggacgattaacggtgtgcgctacgccattccgggggactacgcccaagtcgaggaggacggcacggtcaccatgctgggtcgtggctcggtgtcgatcaacagcggcggcgagaaggtctaccccgaagaggtcgaggccgctttgaaggggcatcccgacgtgttcgacgctctggtggtcggggtgcccgatccgcgttacggccagcaggtggccgccgtggtgcaggcccggccgggttgtcggccgtcgttggccgagttggactcgttcgtgcgctccgagatcgcgggctacaaagtgccgcgcagtctgtggtttgtcgacgaggtgaagcgttcgcccgccggtaagccggactaccgctgggccaaggagcagaccgaggcgcggccagccgatgacgtgcatgcgggacacgtgacgagcggtgggtga

SEQ ID NO: 498 - DNA, 1065 bp, Mycobacterium Tuberculosis
atgagcgttcgcgatattgccgttgtcggcttcgcccacgccccgcacgtgcgccgcaccgacggcactaccaacggcgtcgagatgctgatgccgtgcttcgcccagctatacgacgagctgggcatcaccaaggccgacatcggattctggtgttcgggttcgtcggattacctggctggacgagcattttcgttcatctccgcgatcgactccatcggagccgtaccgccgatcaacgaatcgcacgtcgagatggacgccgcctgggcactgtatgaggcctacatcaaactgctgaccggcgaggtcgacaccgcgctggtgtacggcttcgggaagtcctcggccggaacgctgcgccgtgtgctgtcccgccagaccgacccgtacaccgtcgcgccgctgtggccggattcggtatcgatggcgggactacaggcgcggttggggctggactccggcaagtggacccacgagcagatggcgcgagtggcgttcgattccttcaccaacgctcgccgggtggattccgtggagccgccgatcaccgtcggggaactgctggcacggccgttttttgccgatccgctgcggcgccacgacattgcgccgattaccgacggtgccgccgcggtcgtgctcgcggccgacaaccgcgcccgagaactgcgcgaaaatccggcgtggatcaccggaatcgaacatcgcatcgagtctccggcgctgggggcgcgcgacatcaccgagtctccgtcgaccaaactggcggccaagatagccaccggcggacacaccggcgacatcgacgtggcggagatccatgggccctttacccaccagcacctgatcgtcgcggaggccatcaggattccgggtaagacgaaagtgaatccgtccggcggcccgttggccgccaaccccatgttcgccgccggccttgagcgtatcggctttgccgcacaacatacctgggacggatcggcgcggcgcgtgctggcgcacgccaccagcggaccggcgctgcagcaaaacctggtcgcggtcatggaaggacggggatag

SEQ ID NO: 499 - DNA, 1032 bp, Mycobacterium Tuberculosis
atggtgaagttcacacccgatagccagacgtcagttctgcgcgcgggcaagtgctcaggtactctttctccgtcgcggtcgcgattgcaaagggggagctggccggtggattccgaacgccgacgctacgggtggccgcggaatcgacgcaccttagccattactggagctgcagtcgttgtcgtggtgaccctcgcagccattggttacctgatctttgagccaaaaatttctgggtcgtccacgtccaggcaggccgcatcgccaaccactccttccccgcccagccaggtcgtggtgccgatcgacctttggaatcccgacggggtgacggtggacctggcggacgccgtttacgtggccgactccggtcacaagcgactgctgaaactgccggccggctccaacaccccgaccacgttgccattcaccgacaccatcggtccaggcggcgtggcggtaaacagcaaccgcgacgtctatgtcatcgatgaagacagccaccatgtgttgaaactcgcggccggcatcgaacccccggtcgagctcccgttcggcagccttggcgatgcgcatggtttggcagtggaccgcagcgacagcgtctatgtcgtcgactatgacaatgccaaagtgttgaaactgcccccaggcgcagatacccctaccgaactgccgttcgtcgggctcgaccacccctatgatgtggcggtggacggtgctggcaccgtctacgtgaccgacagcggccacaatcgcgtggtggcgttgaccgcggggtcggccacgccggtgcacctcccattcgccgatctcagctttcccgccggtgtgacggtggaccgcgacgatagcgtctatgtggccgatctgaacaacaatcgggtgctgaagctggcggccggctcgaatgcgcagtcgcagctgccgttcaccggactcttctccccaactgatgtggcggtggacaacgacggcgccgtctacgtgatcgacttttacaaccggatgttaaaactgccgacggcttaa

SEQ ID NO: 500 - DNA, 1155 bp, Mycobacterium Tuberculosis
atgactcggcgtcccgatcggaaagatgtggccaccgtcgacgaactgcacgcatcggctaccaaactggtgggtctcgacgattttggcaccgacgacgacaactaccgtgaggcgctgggtgtgttgctggacgcttaccagggcgaagccggcctcaccgtgttgggcagcaagatgaaccggttcttcctgcgcggtgcgctggtggccaggctactgtcccagtccgcgtggaagcagtatccggagcacgtcgacgttgccatcaaacggcctatcttcgtcaccgggttggtgcgcaccggaaccactgcgctgcaccggctgctgggcgccgacccggcccaccaaggcctgcacatgtggctggccgagtacccgcagccgcgccccccgcgcgagacctgggagtcaaacccgttgtatcgccagctcgatgcacagttcacccagcatcatgccgagaatccgggatacaccggcttgcatttcatggcggcctacgagttggaggagtgttggcagctgttgcggcagtcgctgcattcggtgtcgtacgaggcgctggcgcatgtacccagctatgccgactggttgtcacgccaggactggacgccgtcgtattgccggcaccgccgcaacctgcagctgattgggctcaacgatgccgaaaagcggtgggtactaaagaatccgagtcatctatttgccctggatgcgctgatggcgacctatcccgatgccctggtggtgcagactcaccggccggtggagacgatcatggcgtcgatgtgctcgctggcgcagcacaccacagaagggtggtcgacgaagtttgtgggcgcccagatcggtgcggacgcgatggacacctggtcgcgtgggctggagcggttcaatgccgcacgggccaaatatgattcggcccagttctacgacgtggactaccacgacttgattgccgatccgctgggtacggtggcagatatctaccggcacttcgggttgacgctgtccgacgaggctcgacaggcaatgacaaccgtccacgccgagagccagagcggtgcccgggccccaaagcattcctattcgttggctgactacgggctcacggtcgaaatggtcaaagagcggttcgccgggctgtga

SEQ ID NO: 501 - DNA, 753 bp, Mycobacterium Tuberculosis
gtgagcacccgagccgaagtgtgtgccgtcgcctgcgccgagttgttccgcgatgcaggcgaaatcatgatcagccccatgaccaacatggcctcggtaggggcgcggctggcgcggctcaccttcgcgccggacattctgctgaccgacggcgaggctcagctgctcgcggacacaccggcattgggcaagacgggcgccccaaacaggattgaggggtggatgccgttcggccgggttttcgaaaccctggcctgggggcgccggcacgtggtgatgggcgccaatcaggtcgaccgctatggcaatcagaacatctcggcgttcgggccgctgcagcggccgacccggcagatgttcggcgtccgcggctcgccgggcaacaccatcaaccacgccaccagttactgggtgggcaaccactgcaagcgggtctttgtcgaggccgtcgatgtggtctccggcatcggctacgacaaggtggatccggacaatccggccttccggttcgtcaacgtctaccgggtggtgtccaacctaggcgtgttcgacttcggcggccccgaccactccatgcgggcggtatccctacaccccggggtgacgcccggcgacgtccgcgacgccacctcgttcgaggtgcatgacctcgacgcggccgagcagaccaggctgcccaccgacgacgaactgcacctgatccgcgcggtaatcgatccgaagtcgttgcgggacagggagatacgatcatga

SEQ ID NO: 502 - DNA, 1161 bp, Mycobacterium Tuberculosis
atgacagaggcgtacgtcatcgacgccgtacggaccgcggtcggcaagcggggcggcgcactggccggtatccatcccgtcgacctgggtgccctggcctggcgcggactgctggaccggaccgacatcgaccccgccgccgtcgacgacgtgatcgccggatgtgtcgacgccatcggcggacaggcgggcaacatcgcccgactgtcgtggctggccgccggctatcccgaagaggtccccggtgtcaccgtggaccgccagtgcggatccagccagcaggcgatttcctttggcgcgcaggcgatcatgtccggcacggcggatgtcatcgtggccggcggcgtgcagaacatgagccagatcccgatctcgtcggcgatgaccgtgggcgaacagttcgggttcacctcgccgaccaacgaatccaagcaatggttacaccggtatggcgaccaggagatttcacagttccgtggctcggagctgatcgccgagaagtggaacctgtcccgtgaagagatggagcggtactcgctgaccagccacgaacgcgcgttcgcggcgatccgcgccggccacttcgaaaacgaaatcatcactgtggaaaccgaatccgggccgttccgggttgatgagggcccgcgggagtcgtcgctggagaagatggccggcttgcagccgctggtcgagggcggccggctgacggcggcgatggccagtcagatctccgacggcgccagtgcagtgttgctggcctccgagcgggccgtcaaagaccatggacttaggccccgtgcccgcatccaccacatcagtgcgcgcgccgccgacccggtattcatgctgaccggacccatccccgccacccggtacgcgctggacaagaccgggcttgccatcgacgacatcgacaccgtcgagatcaacgaggcgttcgcgccggtagttatggcctggctcaaggaaatcaaggccgacccggcgaaggtcaaccccaacggcggcgcgatcgcgctggggcatccgctaggcgccaccggcgccaaactgttcaccaccatgctgggcgagctggagcgcatcggtggccgctacgggctgcagaccatgtgcgagggcggcggcaccgccaacgtcaccattatcgagcggctgtag

SEQ ID NO: 503 - DNA, 957 bp, Mycobacterium Tuberculosis
atgaccccccctgaagaacggcagatgctacgggaaaccgtcgcctccctggtggctaagcatgccggcccggcggcggtgcgcgcagcgatggcctccgaccgcggctacgacgaatcgctgtggcggctgctatgtgagcaggtcggtgccgccgcgctggtcattccggaggagctgggcggcgcgggcggtgaactcgccgatgccgcgatcgtcgtgcaggagctgggccgggcgctggtgccttctccgctgctgggcaccacgctggcggagctggcgctgctggccgcagctaagccggatgcgcaagcactcacggagcttgcccaaggcagcgcgatcggcgcgctggtgttggaccccgactacgtggtcaacggcgacatcgccgatatcgtcgtcgccgccaccagcgggcagctgaccaggtggactcgctttagcgcgcagcccgtcgccaccatggaccccactcgccggctggcccgcctgcaatccgaagagaccgagccgctgtgccccgatcccggaatcgccgacaccgcagcaatcctgttggcggccgagcagatcggcgccgccgaacgctgcctgcagctgaccgtcgaatacgccaagagccgagtgcaattcggccgcccgatcggcagtttccaggccctcaagcatcggatggccgacctgtatgtgaccatcgccgcggcccgggccgtcgtcgccgacgcctgccacgcgcccacacccaccaacgccgccaccgcgcggctggccgccagcgaggcgttgagcaccgcggcggccgagggcatccaactgcacggcggcatcgcgatcacctgggaacacgacatgcacctgtatttcaaacgagcgcacggcagtgcacaattgctcgagtcgccacgagaggtgctgcgccgtttggaatctgaggtgtgggagtcgccgtga

SEQ ID NO: 504 - DNA, 828 bp, Mycobacterium Tuberculosis
gtgggatggatcggcgatccgatttggctcgaggaggtgctacggccggcactcggcgagcgcctgcgggtgctcgacggctggcgggaacgcggacacggcgactttcgcgatatccgcggtgtgatgtggcaccacaccggcaactcacgtgagaccgccaaaagcattgcccgcggccggcccgacttacccggcccgctggccaatctgcacatcgcgcacagcggggtcgtaacgatcgtcgcggtaggcgtgtgctggcacgccggccgcggcagctacccgtggctgccaaccgacaacgccaactggcacatgattggcgtcgagtgcgcgtggccgaccatccggcgtgacggctcctacgacgccggtgagcgctggcctgacgcgcagatcgtgagcatgcgagacgtcgccgcggcgctcacgctcaagctcggctacgggcccgaacgcaatattgggcacaaagagtatgccggggcggctcaaggcaaatgggacccgggaaacctgtcgatggactggtttcgcgccgaggtggcaaaggacacgcggggcgagttcgaccaccccctcaccccgccgccggcggtgattgcccgcccaccgattctgcccaagccgcgcaacccgcgtgacgatcgcatcctgctcgaggaggtgtgggaccagctacgcggcatcgagggccgcggctggccggtactcggcgacaagacgatcgtcgactacctagccgagctcggcaataaggtcgacgccctggccgcaaaactcgacgcgcgcgagggcctcgaccggcccagtgacactcggtag

SEQ ID NO: 505 - DNA, 420 bp, Mycobacterium Tuberculosis
atgttacggacgatgctgaagtcgaagatccaccgcgccacggtgacctgcgccgacctgcactacgtcggctcggtgaccatcgatgccgacttgatggacgccgccgacctgctggaaggcgaacaggtaaccatcgtcgatatcgacaacggtgctcgactggtcacctacgcgatcaccggcgaacgcggcagtggtgtgattggcatcaacggtgccgccgcgcacttggtgcatccgggggatctggtgattctgattgcgtacgcgacgatggacgacgcccgggcccgcacataccagccgcggatcgtgtttgtcgacgcttacaacaaaccgatcgacatgggccacgatccggcatttgtgcccgaaaacgcgggcgagctgctagacccccggctcggtgtgggatag

SEQ ID NO: 506 - DNA, 567 bp, Mycobacterium Tuberculosis
atgacgcgggtagtgctctcggttggctccaacctgggtgaccgcctggcacgattgcggtcggtcgccgacggtctcggcgatgcgttgattgcggcttccccgatatatgaggccgacccctggggtggggtggagcaggggcagttcctcaatgcggtgctgatcgccgacgatcctacctgcgaaccgcgggagtggctgcggcgggcgcaggagttcgagcgcgctgcgggcagggtgcgtggccagcgctggggtccacgaaatctcgacgtcgacctgatcgcctgctaccagacctcggccaccgaggctctggtcgaagtgaccgcgcgggagaaccacctcacgctgccgcacccactggcgcatctgcgggcctttgtgttgatcccgtggattgccgtcgacccaacggcgcagctgacggttgccgggtgcccgcggcccgtcacgcgactgctggccgagctggagcccgccgaccgcgacagtgtgcggttgtttaggccgtcgttcgatctgaatagcagacaccccgtcagtcgggcaccggaaagctga

SEQ ID NO: 507 - DNA, 843 bp, Mycobacterium Tuberculosis
gtgagtccggcgcccgtgcaggtgatgggggttctaaacgtcacggacgactctttctcggacggcgggtgttatctcgatctcgacgatgcggtgaagcacggtctggcgatggcagccgcaggtgcgggcatcgtcgacgtcggtggtgagtcgagccggcccggtgccactcgggttgacccggcggtggagacgtctcgtgtcatacccgtcgtcaaagagcttgcagcacaaggcatcaccgtcagcatcgataccatgcgcgcggatgtcgctcgggcggcgttgcagaacggtgcccagatggtcaacgacgtgtcgggtgggcgggccgatccggcgatggggccgctgttggccgaggccgatgtgccgtgggtgttgatgcactggcgggcggtatcggccgataccccgcatgtgcctgtgcgctacggcaacgtggtggccgaggtccgtgccgacctgctggccagcgtcgccgacgcggtggccgcaggcgtcgacccggcaaggctggtgctcgatcccgggcttggattcgccaagacggcgcaacataattgggcgatcttgcatgcccttccggaactggtcgcgaccggaatcccagtgctggtgggtgcttcgcgcaagcgcttcctcggtgcgttgttggccgggcccgacggcgtgatgcggccaaccgatgggcgtgacaccgcgacggcggtgatttccgcgctggccgcactgcacggggcctggggtgtgcgggtgcatgatgtgcgggcctcggtcgatgccatcaaggtggtcgaagcgtggatgggagcggaaaggatagaacgcgatggctga

SEQ ID NO: 508 - DNA, 312 bp, Mycobacterium Tuberculosis
atgacggaaaacttgaccgtccagcccgagcgtctcggtgtactggcgtcgcaccatgacaacgcggcggtcgatgcctcctcgggcgtcgaagctgccgctggcctaggcgaatctgtggcgatcactcacggtccgtactgctcacagttcaacgacacgttaaatgtgtacttgactgcccacaatgccctgggctcgtccttgcatacggccggtgtcgatctcgccaaaagtcttcgaattgcggcgaagatatatagcgaggccgacgaagcgtggcgcaaggctatcgacgggttgtttacctga

SEQ ID NO: 509 - DNA, 1179 bp, Mycobacterium Tuberculosis
atgagcagagcgttcatcatcgatccaacgatcagtgccattgacggcttgtacgaccttctggggattggaatacccaaccaagggggtatcctttactcctcactagagtacttcgaaaaagccctggaggagctggcagcagcgtttccgggtgatggctggttaggttcggccgcggacaaatacgccggcaaaaaccgcaaccacgtgaattttttccaggaactggcagacctcgatcgtcagctcatcagcctgatccacgaccaggccaacgcggtccagacgacccgcgacatcctggagggcgccaagaaaggtctcgagttcgtgcgcccggtggctgtggacctgacctacatcccggtcgtcgggcacgccctatcggccgccttccaggcgccgttttgcgcgggcgcgatggccgtagtgggcggcgcgcttgcctacttggtcgtgaaaacgctgatcaacgcgactcaactcctcaaattgcttgccaaattggcggagttggtcgcggccgccattgcggacatcatttcggatgtggcggacatcatcaagggcaccctcggagaagtgtgggagttcatcacaaacgcgctcaacggcctgaaagagctttgggacaagctcacggggtgggtgaccggactgttctctcgagggtggtcgaacctggagtccttctttgcgggcgtccccggcttgaccggcgcgaccagcggcttgtcgcaagtgactggcttgttcggtgcggccggtctgtccgcatcgtcgggcttggctcacgcggatagcctggcgagctcagccagcttgcccgccctggccggcattgggggcgggtccggttttgggggcttgccgagcctggctcaggtccatgccgcctcaactcggcaggcgctacggccccgagctgatggcccggtcggcgccgctgccgagcaggtcggcgggcagtcgcagctggtctccgcgcagggttcccaaggtatgggcggacccgtaggcatgggcggcatgcacccctcttcgggggcgtcgaaagggacgacgacgaagaagtactcggaaggcgcggcggcgggcactgaagacgccgagcgcgcgccagtcgaagctgacgcgggcggtgggcaaaaggtgctggtacgaaacgtcgtctaa

SEQ ID NO: 510 - DNA, 297 bp, Mycobacterium Tuberculosis
atgacctcgcgttttatgacggatccgcacgcgatgcgggacatggcgggccgttttgaggtgcacgcccagacggtggaggacgaggctcgccggatgtgggcgtccgcgcaaaacatttccggcgcgggctggagtggcatggccgaggcgacctcgctagacaccatgacccagatgaatcaggcgtttcgcaacatcgtgaacatgctgcacggggtgcgtgacgggctggttcgcgacgccaacaactacgaacagcaagagcaggcctcccagcagatcctcagcagctga

SEQ ID NO: 511 - DNA, 972 bp, Mycobacterium Tuberculosis
atggatcgacagagtgctgtagcgcagctgcgtgcggctgcggagcagttcgctcgggtccatctcgacgcctgcgaccgttggagcgtggggctctccggcggcccggactcgttggcgctcaccgctgtagccgcacggctgtggcccaccaccgcactgatcgtggaccacggtctgcagcccggctcggccacggtcgcggaaacagctcgcatacaagcgatttcgctgggatgtgtggacgcgcgggtgctttgcgttcaggtgggcgcggccggcggccgggaggcggcggcgcgcagcgcccgctactcggcattggaggagcaccgcgatggcccggtgctgttggcccatacgctcgatgatcaggccgagacagtgttgttggggcttggccgtggttcgggggcccggtcgatcgccggcatgcgtccgtacgatccgccctggtgccggccgctgctgggggtgcgccgcagcgtgacacatgcggcctgccgggagctgggcctgaccgcctggcaggatccgcacaacaccgaccgccgcttcacccgaacccgattgcgcaccgaagtgctgccactgctggaggacgtgctgggcggaggtgtggccgaagcgctggctcgcaccgcgacagcgttgcgcgaggacactgacctcatcgacacgatcgctgcgcaggcgctgcccggagccgctgttgctggctcacggggacaggagttgagtaccagcgccttgaccgcgctgccggatgcggtgcggcgccgggtgattcggggctggctgctggccggcggcgcgaccggactgaccgacaggcagatccgcggagtggaccggctggtcaccgcgtggcgcggtcagggcggggtagcggttgggtccacgttgcgcggtcagcgactggtcgccgggcggcgcgacggcgtacttgtgttgcggcgcgagcccgtttga

SEQ ID NO: 512 - DNA, 1386 bp, Mycobacterium Tuberculosis
atgggtcccacacgctggcggaaatccacgcacgtggtcgtcggcgcggccgtgctggcgtttgtcgccgttgtggtggcggccgcagcgctggtcactactggtggtcaccgggctggcgtgcgcgcacctgcgcctccaccgcggccacccacagtcaaggcgggagtggtccctgtggcggacaccgctgcgacaccgagtgccgctggcgtgaccgcggcgcttgcggtggtggcggccgatcctgatctgggcaagttagcaggtcggatcaccgatgccctgaccggacaagaactttggcagcggctagacgacgtgcccttggtgccggcttcgaccaacaaaatcctgacggcggcggcggctctgctgacactggaccgacaggcccggatcagcacgcgggtggtggccggcggccagaacccccagggacctgtcgtgttggtgggcgcgggcgatccgacgctgtcggcagcgccgcccggtcaggacacctggtatcacggcgcggctcgcatcggtgacctcgtcgaacaaattcgccgcagcggtgtgacgcccaccgccgtgcaggtggacgcttcggcgtttagcggtccgacgatggcgccgggttgggatccggccgatatcgacaacggtgacatcgcgccgatcgaagcggcgatgatcgacgccgggcgtatccagccgaccaccgtcaattcgagacggtcccgcaccccggcgctggatgccggtcgggagttggccaaagcccttggcctggaccccgcggcggtgacgatcgcatcggctccggccggcgcgcggcagctggccgtggtgcagtcggcgccgttgatccagcgactgtctcagatgatgaacgcctccgacaatgtgatggccgagtgcatcggccgcgaggtagcggtcgcgatcaaccggccgcagagctttagtggcgcggtcgacgcggtgaccagccgattgaacaccgcacacatcgacaccgccggcgctgcgctggtggattctagtggattgtcgctcgacaaccgcctgaccgctcggacgctcgatgcaacgatgcaggccgcggctggacccgaccagcccgcgttgcggccgctgctggatctgctaccgatcgccggtggcagtggcacgctgggcgagcgcttcctcgacgcggccaccgaccagggtccggccgggtggttgcgggccaagaccggctcgctgaccgcgatcaactcgctagtcggggtgctcaccgaccgtagcggccgagtgctcaccttcgcgttcatctccaacgaagccggtcccaacggtcgcaacgcgatggacgctctggccactaagttgtggttctgcgggtgcacgacgtga

SEQ ID NO: 513 - DNA, 489 bp, Mycobacterium Tuberculosis
gtgcaattcgacgtgaccatcgaaattcccaagggccagcgcaacaaatacgaggtcgaccatgagacggggcgggttcgtctggaccggtacctgtacaccccgatggcctacccgaccgactacggcttcatcgaggacaccctaggtgacgatggcgacccgctggacgcgctggtgctgctaccgcagccggtcttccccggggtgctggtggcggcgcggccggtggggatgttccggatggtcgacgagcacggcggcgacgacaaagtgctgtgcgtcccagccggtgacccccggtgggaccacgtccaagacatcggggacgttccggctttcgagctggatgcgatcaagcatttctttgtgcactacaaggacctggaaccaggtaagttcgtcaaggcggccgactgggtcgaccgcgccgaagccgaggcagaggtgcagcgttcagtggagcgcttcaaggccggtacacactga

SEQ ID NO: 514 - DNA, 636 bp, Mycobacterium Tuberculosis
gtgccgcatccatgggacaccggcgatcacgaacggaattggcagggctacttcatccccgctatgtccgtcttgaggaaccgggtcggcgctcgaacgcatgccgaactgcgtgatgccgagaacgacctcgttgaggcccgggtgatcgaactccgcgaggatcccaatctgctgggcgaccgcacagatctcgcatacctgcgggcgattcaccgccagctgttccaggacatttacgtctgggcgggagatctgcggacagtcggcatcgagaaggaggacgagtctttctgcgcgccgggcggcatcagtcggcccatggagcatgtggctgcggagatctaccagctcgaccggctcagagcggtcggcgaaggtgatctcgctggccaggtcgcataccggtacgactacgtgaactatgcccacccgttccgcgagggcaacggccgctcgacccgcgagttcttcgatctcctgttgtccgaacgcggttctggcctcgactgggggaagaccgacctggaagagttgcacggcgcttgtcacgtggcgcgcgccaactctgatctcacgggcctggtcgcgatgttcaaggggatcctcgacgccgagcccacttacgacttctga

SEQ ID NO: 515 - DNA, 285 bp, Mycobacterium Tuberculosis
gtgtcgtttgtgatcgcggcgccggaggcgttggactcggcagcaacggacctcgtggtcctgggctcgacgttaggcgcggccactgcggccgcggcggcccagacgacgggtatcgtggccgcggcccacgacgaggtgtcggcggcgatcgcagccctgttttccgcccacggccaggcctatcaggccgccagcgcgcaggccgcggcgtttcacacccggttcatccgtgcgcgctcccgacatccgcagcaggaaacgacctgtcgccgtgtgcgatag

SEQ ID NO: 516 - DNA, 588 bp, Mycobacterium Tuberculosis
ttgctgaatgcgcccactcaggcgctgttggggcgtccgttggtgggcaatggcgccaatggggccccggggactggggcaaacggcggcgatggcgggattttgttcgggtccgggggggccggcgggtccggagcggccggcatggcgggtggcaacggcggggccgccgggctgttcggcaacggcggagccggcggagccggcggcagcgcgacggccggtgcggccggggcgggcgggaacggcggggccggcgggctgctgttcggtaccgccggggccggcggcaacggcgggttaagcctcggtttgggcgtcgccggcggcgccggcggcgccggcgggtcgggcggtagtgacaccgccggacacggggggaccggtggtgccggcggcctgctattcggcgccggcgaggacggcacaacgcccggtggcaacggtggggcgggcggtgtcgccgggctgttcggcgacggcggcaacggtggtaacgccggagttggcacgcccgcgggcaacgtcggcgccggcggcaccggcggcctgctgctcggccaggacggcatgaccgggttgacgtag

SEQ ID NO: 517 - DNA, 519 bp, Mycobacterium Tuberculosis
gtgagcaagatcgatcgcaagaacggtgtgcccagcacgctgaccacgattccgttggccgacccgcacgccggacctgctgagccgtcgatcggtgacctgatcaaagacgcgacaacgcagatgtcgacgctggtccgagccgaggtcgagctggcccgcgccgagatcacccgggacgtcaagaagggactgaccggcagtgttttcttcatctcctcgctggtggtcgggttctactccaccttctttttcttctttttcgtcgccgaactgctcgatacctggatctggcgctgggtggctttcttgctcgtgttcgccataatggtcgtggtcaccgccgtgttggccctcttgggtttcctgaaagtccggcgcatccggggaccgcggcagaccattgcgtcggtcaaagagacgcgcaccgcacttaccccgggccatgacaaaacccctgtgacaccaaaacccgtgacatctgatcgcgcgacgccggttgacccctcgggttggtag

SEQ ID NO: 518 - DNA, 738 bp, Mycobacterium Tuberculosis
gtgcccgggcgctggtctgcagaaacccggctcgccttggtgcgacgggcgcggcgaatgaatcgcgctttggcacaggcatttccgcacgtatactgcgagctggacttcaccacgccgctcgagctagccgtggcaaccatactttcggcgcagagcaccgacaaacgggtgaatttgacgacgccagccttgttcgcgcggtatcggacggcacgggactacgcccaggcggatcgcaccgagctcgagagcctcatccgccccaccggcttctaccgcaacaaagcggcctctctcatcggcctggggcaggccctagttgagcggtttggcggtgaggtgccggccaccatggacaagttggtgacgctgcccggggtggggcgcaaaaccgccaatgtcatcctgggtaacgcattcggtatccccggaatcacggtggatactcatttcggacgattggtgcgccggtggcgctggaccaccgcagaggacccggtcaaggtggagcaggcggtcggtgagctgatcgaacgcaaggagtggaccttgctcagccaccgagtgatctttcacggacggcgggtgtgccacgcccgcagaccggcgtgtggtgtttgtgtgcttgccaaagactgcccctccttcgggcttggccccactgaaccgctgctcgcggcgcccctggtccagggccccgagaccgatcacctgctggccctggctggactgtaa

SEQ ID NO: 519 - DNA, 378 bp, Mycobacterium Tuberculosis
atgtttactctccttgtgtcatggttgctcgtggcctgcgttcctgggttgttgatgctggcgaccctcgggttgggacggctggaaaggtttctggcccgagacacggtcacggcgaccgacgtcgcggagtttctcgagcaggccgaggccgtggatgtgcatacgctcgctcggaatggaatgccggaggcgctggattacctgcatcgacgtcaagcccggcgaatcaccgattcaccgccgcttgggtctggcgctgggccacggtatgccgggccgctgtttgtcaccgatctcgatagccccgtcgagccaccccggcatggccagcccaatccgcagtttagaacggctcgacacgcaaatcacgtgtag

SEQ ID NO: 520 - DNA, 1161 bp, Mycobacterium Tuberculosis
atgagtgtcacaccgaagaccctcgatatgggcgcaatcctggccgacacatccaaccgggtggttgtgtgctgcggcgccggtggggtcggcaagaccactaccgcggccgcgctggcgttgcgcgcggccgagtatggccgcactgtggtcgttttgacgattgacccagccaagcgattggcacaagcactggggatcaacgatcttggcaacacaccacaacgcgtgccattggcacccgaggttcccggcgagctacacgcgatgatgctcgacatgcgccgcacgtttgacgaaatggttatgcaatactctggacccgaacgggcgcaatcgattctggacaaccagttctatcagaccgtcgccacatcgcttgccggcacccaagagtacatggctatggagaagctgggccaactgctaagccaggaccgctgggacctgattgtggtagacactccgccgtcgcgtaacgcgctggacttcttagacgcgccaaagcgactgggcagcttcatggatagtcggctgtggaggctgttactcgctcccggccggggcatcgggcggctgatcaccggcgtgatgggattggccatgaaggcgttgtccaccgtgctcggttcccagatgctggccgacgcagcagcgttcgttcaatcgctggacgccacgttcggtggtttccgcgagaaggcagaccgcacttacgcgttgttgaaacggcgcggcacccagttcgtggtggtgtcggcggccgaacccgacgcactgcgcgaggcgtccttcttcgtcgaccggctatcgcaggagagcatgccgctagcggggctggtcttcaaccgcacgcacccgatgctgtgcgcattgccgatcgagcgggcaatcgacgccgccgaaacgttggatgccgagaccaccgactccgacgccacatcgctggccgcagcggtgctgcgtatccatgccgagcgcgggcagacagccaaacgggagatccggctgctgtcccggttcaccggagccaaccccaccgtgccggtcgttggggtaccgtcgctcccgtttgacgtctctgacctggaagcgctgcgggcgctcgccgaccagctcaccacggtcggcaacgatgcgggccgcgcagcgggccgctga

SEQ ID NO: 521 - DNA, 933 bp, Mycobacterium Tuberculosis
atgtcggaggtggtgaccggcgacgccgtggtgctcgacgtacagatcgcccagttgccggtgcgcgcggtcagcgcggtcatcgatatcaccataatattcatcggctacatcctcggtctgatgctgtgggcgaccgccctgacccagttcgacgaagccttgaccaccgcattcctgatcatcttcacggtgctggcgctggtcggctatcccctggtctgggaaaccgcaacgcggggccgatcagtggggaagatcgtgatgggtctgcgggtggtgtcagacgacggtggcccggagcggttccggcaggcgctgtttcgcgcgttagcgtcggtggtggagatctggatgctgctcgggagccccgccgtgatctgcagcatgttgtcgccaaaagccaagcgagtcggcgacgtcttcgcgggcacggtcgttgtcagcgaacgtggtccgcggttggggccgccgccggtgatgccaccgtcgctggcctggtgggcgtcgtcgctgcaattgtctgggcttaccgccggccaagccgaggttgcacgtcaatttctggtgcgggcaccgcaactcgatcctgcgctacgcgagcagatggcctaccggatcgccggtgatgtggttgcccgcatcgctccgccgccgccacccggagttccaccacagttggtcctggccgccgtcctcgccgaacgacaccggcgtgaactgttgcgactgcgtcccacgctgcctcccgcaggacaggcgccatgggcccaaatggcgcctcatcggggttggccgcccggtttgtccggcgccacgccgtggtctcctcagcagccggtgatcccctggccggagccagatccgccaccgcaagccgctccctggccgcagcaggcgccggacggcccgggattctcgccgccgggctag

SEQ ID NO: 522 - DNA, 966 bp, Mycobacterium Tuberculosis
atgagagtgtcggttgccaaccatctgggcgaggatgcggggcatctggcgttgcgccgcgatgtgtactctggcctgcagaagacaccgaaatcgttaccgcccaagtggttttacgacacggtgggtagtgaactgttcgatcagatcacccggttgccggagtactacccgacccgagccgaggccgaaatcctacgggccagatcggccgaagtggcttccgcctgccgggccgatactttggtcgagttgggtagcggcacctcggagaagacccggatgctgctggatgcgttgcgccaccggggatcgctgcgcagattcgtcccgttcgacgtcgacgccagcgtgctgtcggcaactgcgaccgcaattcagcgtgaatacagtggtgtcgaaatcaacgctgtttgtggggatttcgaggagcatttaaccgagattcccaggggaggacggcgcctgtttgtgttcttggggtccacgatcggcaacctcacgcccgggccgcgcgcgcagttcctgacggccctggccggggtaatgcggccgggcgatagcctgctgctgggcaccgacctggtcaaggacgcggcccggctggtgcgcgcctacgacgatcctggcggggtgacggctcagttcaatcgcaacgtgcttgccgtgatcaaccgggaactcgaagcggatttcgacgtcgatgccttccagcacgtcgcccgttggaacagcgcagaagagcggattgagatgtggttgcgtgccgacggtcgccagcgggtacgggtcggtgcactggacctgaccgtcgacttcgacgccggggaggagatgttgaccgaggtctcgtgcaagttccggccgcaagcggtcggtgccgagttggccgcggccggactgcatcgcatccgatggtggaccgatgaagccggtgactttggcctgtcgctggccgccaagtga

SEQ ID NO: 523 - DNA, 321 bp, Mycobacterium Tuberculosis
atgcgacacatgagtgaaacatctgaaaccccaacaccaccgcctcaccagacccccaaggtgttcaaagccgcggcgtgggtagccattgccgccggaaccgtgttcatcgtggcggtcatcttcttcaccggctatatcctcggcaagcatgccggtcacggcggcttccaccaccggcaacaccaccagcacccggcgatgatgctgcgaccgggcagtccgcacggtgggcccgcggcagtgcgtcccggcccaggcccgggcgggcccggccaggtgccgtcgtccgtcagtcctcccgcgacacccgctccgtaa

SEQ ID NO: 524 - DNA, 891 bp, Mycobacterium Tuberculosis
atgttgatctcacggatgtcggtgcggagtgccagcatgtccgtcatgggtgacgtcttcatcggcagcgaggccatcaccgctggtcgcctgaccaggcacgagctgcaacgttggtatcagccgatgttccgcggtgtgtacgtctcgaggcgctcagtgcccacactttgggatcgcacggttggcgcctggctagccacgaggcgccatggcgtcatagctggtaatgcggcctctgcgctgcatggtgctcagtgggtggacgtcgacgtggccatcgagctgatttctcccactacccgcccgcagcacggtcttgtcatacgtcgtgagaccttgtgcgacgacgagatcaccagggtggtgggcctgccggtcaccacactggcgcggacggcatacgacctcggccgccatctgtcccgcggcgaagccgtggctcgtctcgatgccctcatgcgtgccaccccgttttcccgcgacgacgtgcttctattggccaagcgtcacgcgggcgcccgaggtgtccgccggttgcgtgacgtgctgccccttgttgatggcggcgccgcgtcgcccaaggagacctggctgcggctgttgttgatcgacgccggcctgccagtccccacgacgcaaattccggtggtccaccgctggcgcaacgttggcgtgctcgacatgggctgggagaaatacatggtggccgccgagtacgacggtgatcagcatcgcagcgaccgcggtcgctacgtgaaagaccagcggcggctccgcaagctggccgagttgggctggatcgtcattcgcgtgatcgccgaggacaaccccgacgacgtggtgaaccgcgtgcgtgccgctctgctggccaggggatggcggccctaa

SEQ ID NO: 525 - DNA, 444 bp, Mycobacterium Tuberculosis
atgggacaggtgagcgcagccagcacgatcttgatcaatgctgagcccacggccacactcgacgcgctggccgactatgagaccgtccgtcctaaaatcctgtccccgcactacagcgagtaccaggtgctcgagggcggcaaggggcggggcacagtcgccaagtggcggctgcaggcgacgcagtcgcgtgttcgcgatgtgcaggtgaacgtggacgttgccgggcacaccgtcatcgagaaggacatgaattcgtccatggtcaccaactggacggtcgctcccgccggacccggttccagcgtcacggtgaagaccacctggaccggcgcgggcggggtcaagggtttcttcgagaagacctttgcgccgctagggctgaagaagatccaggccgaggtgctgtccaacctcaagaccgaactcgagggtgacgcctga

SEQ ID NO: 526 - DNA, 930 bp, Mycobacterium Tuberculosis
atgcagaatgccaccatgcgcgttctggtcaccggcggtacgggatttgtgggcgggtggactgccaaagccatcgctgacgcgggccactccgtccggttcctggtgcgaaatcccgcacggctgaagacgtctgtcgcgaaactgggcgtcgacgtgtcggactttgcggttgcagacatatccgaccgcgattcggtacgggaggcgttgaacggatgcgacgccgtcgtgcacagcgccgcgctggtggcaaccgacccgcgtgagacttcgcggatgctgagtacgaacatggcgggcgcccaaaatgttctcggtcaagccgtcgagctcggaatggatccgatcgtgcatgtgtcgagcttcacggcgctgtttcgtcccaacttggcgacgctgagcgctgatctgccggttgccggtgggacggatggatacggacaatccaaagcgcagatcgaaatctatgcgcgcggtcttcaggacgccggcgcaccggtgaacatcacttatcctggcatggtcctcggcccgccggtgggcgatcaattcggtgaagccggggagggtgtccggtccgcattgtggatgcatgtcattcccgggcgcggcgcggcgtggttgatcgtcgacgtccgagatgtggcggcactgcacgcggcgttgttggaatccgggcgtgggccgcgccgctacactgcgggaggtcatcggattccggtgcccgagctcgcgaaaattctgggcgggtcgccggcaccacgatgctggccgtcccggtgcccgattccgcgctgcgtgtcgcgggatcggtgctggatcaagccgggccctatctgcctttcaatactccgttcaccgcggcaggtatgcagtactacacacagatgccggagtccgacgattcgccgagcgaaaaagaactag

SEQ ID NO: 527 - DNA, 480 bp, Mycobacterium Tuberculosis
gtgaagcgtggactgacggtcgcggtagccggagccgccattctggtcgcaggtctttccggatgttcaagcaacaagtcgactacaggaagcggtgagaccacgaccgcggcaggcacgacggcaagccccggcgccgcctccgggccgaaggtcgtcatcgacggtaaggaccagaacgtcaccggctccgtggtgtgcacaaccgcggccggcaatgtcaacatcgcgatcggcggggcggcgaccggcattgccgccgtgctcaccgacggcaaccctccggaggtgaagtccgttgggctcggtaacgtcaacggcgtcacgctgggatacacgtcgggcaccggacagggtaacgcctcggcaaccaaggacggcagccactacaagatcactgggaccgctaccggggtcgacatggccaacccgatgtcaccggtgaacaagtcgttcgaaatcgaggtgacctgttcctaa

SEQ ID NO: 528 - DNA, 987 bp, Mycobacterium Tuberculosis
gtgaccatcatgcgtgccgtcgtcgccgaatcctcagatcgactggtatggcaggaagtccccgacgtgtcggctgggccgggcgaagtgctcatcaaggttgccgcttccggtgtcaaccgcgccgacgtgctacaggccgccggcaaatatccgccgcccccgggagtaagcgacatcatcggcctagaggtgagcggcatcgtcgctgcggtcggtcccggggttaccgaatggtctgccggacaagaggtttgcgccttgcttgccggcggcggctatgccgaatacgttgccgttccggccgaccaggtgctgccgattccgccgagcgtcaacctggtcgactcagccgccctgcccgaagtggcgtgcacggtgtggtcgaacctggtgatgaccgctcatctgcggccgggtcagctggtgctgattcacggcggggccagcggcatcggcagccacgcgatccaggtggtccgcgccctggcagcacgggtggcgatcaccgccggctcaccggagaaactggagctctgtcgcgacctgggcgcccaaatcaccatcaactaccgcgacgaggatttcgtcgcgcggctgaagcaagagaccgatggtagcggcgctgacatcatcctcgacatcatgggagcgtcctacctggaccgcaatatcgacgcgctggccaccgacggccagctgatagtcattggcatgcagggcggggtgaaggccgagctcaacctgggcaagctgctcaccaagcgggcgcgcgtcatcggtaccacgctgcgggcccggccggtcagcggcccgcacggcaaggcggccatcgcccaggcggtggcggcctcggtctggccgatgatcgccgcgaaccgggtccggcccgtcatcggcacccggctgcccatccaacaggcggcacaagcgcatgaactgatgttgtcgggcaagacgttcggaaagattctgctgacggtatag

SEQ ID NO: 529 - DNA, 2001 bp, Mycobacterium Tuberculosis
gtgggcctgtggttcggtacgctaatcgctttgattttgctgatagcgccgggggcaatggttgctcgcatcgcccagctgaggtggccggtcgccatcgcggttggcccggcgctgacatacggcgtggtggcactcgcgatcatcccctatggcgcgctcggaattccctggaacggttggaccgcgctggccgccttggcggtgacgtgcgctgtagcgaccggtttgcagctactgcttgcccgttttcgggacctcgacgccgaggcacttgcggttagccgctggcccgcggttacggtcgccgccggggtgctgctgggcgccctgttgatcggatgggccgcatatcgcggcataccgcactggcagtccatccccagcacctgggacgcggtctggcacgccaacaccgtacgtttcatcctggacaccggccaggcgtcctcgactcacatgggggagcttcgcaacgtcgagacccatgccccgttgtactacccgtcggtgttccacgggctggtcgcggtgttctgccagttaaccggcgcggcacccaccaccggctacacactgagttcgctggccgcctcggtctggctgtttccggtcagtgcagccgttctcacctggcgcgcggtgcgctcacacccgggcgcgctgtggtcggcctcctgcgcctcggcagagtggcgcgccgccggagcggcgggcaccgccgcggcactctcggcgtcgttcaccgcggtgccctacgtcgagttcgataccgccgctatgcccaacctggcggcctacggcatcgcggtgccgacgatggtgctgatcacctcgacattgcggcaccgcgaccgcatcccggtggccgtgctagcgctggtcggcgtcttctcactgcacattaccggcggtatcgtcgtagcgctgttggtgtcggcctggtggcttttcgaggcactgcggcatcctgtgcgatcaaggctggccgacctgttgacgctggccggcgtggcagcgatggccgggttggtcatgttgccgcagttcttgagcgtcaggcagcaggaagacatcatcgccggacacgcttttcccacctatctcagcaagaagcgtgggctgttcgacgctgttttccagcactcccgccatctcaacgacttcccggtccagtacgcgctcattgtgttggccgccatcggcgggctcattctgctggtcaagaagatctggtggccgctggcggtttggctgctgttgattgtgatgaacgtcgacgcgggaacaccgttgggcggacctatcggaggggtggccggcgcactcggcgagttcttctatcacgatccgcgccgcatcgcggcggccacaaccctgctgttgatgctgatggcaggtgtggcgctgttcgcgacagtcatgttgctagtggccgcggcgaaacgactgaccgaccgtttcagaccccagccggtgtctgtctgggcatcggcgaccgcgacactactgatcggagccactctggtcagtgcgtggcattactttccccggcaccgatttctgttcggcgacaagtacgactcggtgatgatcgaccagaaagatctcgacgccatggcatacctggcgagtttgcccggcgcacgcgacacgttgattggcaacgccaacacggacggcaccgcgtggatgtatgccgtggccggcctacacccgctgtggacccactacgactacccgctgcaacagggcccgggctatcaccggttcatcttctgggcctatggccgcaacggggagagcgatcctcgggtactcgaggccatccaagtcctccgtatccgctatatcctgaccagcactccgacggtgcgggggtttgccgtgccggacggactagtgtcgttagagacatcgaggtcgtgggcgaagatctacgacaacggcgaggcccgaatctacgaatggcgcggcactgccgcagcaacacactcctag

SEQ ID NO: 530 - DNA, 1224 bp, Mycobacterium Tuberculosis
atgcggattctggcgatgacgcgtgcgcacaacgccgggcggacactagccgcaacgttggactcgttggccgtgttcagcgacgacatctacgtgatcgacgaccgcagcaccgatgacaccgccgagatcctggcgaaccatcctgcggtgacgaacgtggtgcgggcccgaccagatctgccgcccacgccatggctgattcctgagtccgccgggctggaactgctgtatcggatggcggacttctgccgcccggactgggtgatgatggtcgatgccgattggttggtcgagaccgacatcgatcttcgggcggtgttagcccgcacaccggacgacatcgtggcgctgatgtgtccgatggtgtcacgctgggatgatccggagtatcccgacctgattccggtgatgggaaccgccgaagcgctacgtggaccgttgtggcgctggtacccgggtctgcgggcaggcggcaagctgatgcacaacccgcattggccggccaacatcaccgatcacggtcgcatcggacagcttccgggggttcggctggtgcatagcggctggtcgacgctggcggaacggatcttgagggtggagcactatctgcggctcgatccggactatcggttcaacttcggggtggcctacgaccgatctttgttgtttggctacgcactcgacgaggtcgacctgctcaaagccgactaccggcggcgcatccgcggcgacttcgatccgctcgagccgggcgggcggctgccgatcgaccgggagccgcgcgcgatcggccgcgggtacggtccgcacgcgggtggtttccatcccggtgtcgacttcgccaccgatccgggaacacccgtctacgcggtcgcttccggggccgtcagcgcgatcgacgaggtcgatggcctggtgtcgctgacgatcgcacgctgcgagctcgacgttgtctatgtatttcggcccggggacgagggccgccttgtccttggtgatcgaatcgccgcgggagcgcaactgggcaccatcggtgcgcaaggcgaatcggcagatggttatctgcatttcgaggtccgcacgcaggacgggcatgtcaatccggtgcggtacctagccaacatgggactacggccgtggccgccaccgggacggttgcgagccgtatcgggcagctacccgccggccacgccatgcaccatcaccgccgaggatcggtag

SEQ ID NO: 531 - DNA, 1782 bp, Mycobacterium Tuberculosis
atgcccgagtacgacctagaggccgtggacaagctgcccttctcgacccctgaaaaggcgcagcgctaccaaacggaaaactatcgcggggccatgggcctcaactggtacctcacggatccgaccctgcagttcatcatggcctattacctacgacccgatgaattggcgttcgcagaaccccatctgacccgcattggtgagctgacgggggggccagtgacgcgttgggccgaggaaaccgaccgcaaccccccgcggctcgaacgctacgaccggtgggggcatgacatcagccgggtagtgctgccggaatcgttcatccaatccaagcgcgccgtcatcgaggcgcgacaagccgtgcgcgacgacgcggcacgggccggcgtcaagccgtcgctggcactcttcgccgccgactatctgctcaaccaggccgatatcggtatggcttgcgcgctcgccactggcggcaacatggtccggtcgctggtgactgcctacgcgccacccgatgtgcgcgaattcgtcctaggcaaactcaattccggcgagtgggacggcgaggccgcgcagctgctgacggagcgtgcgggcggctccgatctgggagctctggagacgacggccacccgcagcggcgacgtgtggctgctgaacggcttcaagtggtttgcgtccaactgcgccggggaggcgttcgtggtgttggccaagcccgagggggcgcctgactcgactcgaggtgtggccaccttcctcgtgctacggacgcgccgtgacggttcccgcaacggcgtgcgtatccgtcggctgaaggacaagctcggcacccgctctgtcgcctccggtgaaatcgagttcgtcgacgccgaagcctttctgttgtccggcgaaccgagcgctgacgcgggcccgtccgacggcaagggactcacccgcatgatggagctgaccaacagattgcggttgggcaccgcctcgttcgccctcggcaacgcgcgccgcgcgctggtcgaatcgctgtgctacgccgggcagcggcgggcattcggtggggcgctcatcgacaagccgctgatgcgccgcaagctggccgaaatggtcgttgatgtggaagccgcgctggcgatggtgttcgacggcttcggagcggcgaaccaccgccagcccagatgcctgccgcaacgtatcgcggtgccggtcaccaagcttaagacttgccggctcgggatcaccgtggcatcggatgcgatcgagatccacggcggcaatggctacatcgagacctggccggtggcccggttgctgcgtgacgcgcaagtcaacacgatctgggagggccccgacaacatcctgtgtctggatgtgcggcgcgggatcgagcagacgcgcgctcacgagacactgttggcgcggctgcgcgatgcggtgtcggtgtccgacgatgacgacaccacgcggctggtctcgcgccgcattgaggacctcgacgcggcgatcaccgcttggaccaaactcgacaggcagctggccgaggcgcggctgttcccgctggcccaattcatgggcgacgtctacgccggcgcgttgctcaccgagcaggccgcctgggaacgggcaacccgcggcaccgaccgcaaggcactcgtcgcccgcctgtacgcgcgccggtatctcgccgaccaaggcccgctgcgcggtatcgacgcagattgcgatgaggcgctgcagcgtttcgacgaactcgtggcgggcgcgttcactgccgagcagacgtaa

SEQ ID NO: 532 - DNA, 5202 bp, Mycobacterium Tuberculosis
atggctgacgtagcggaatcccaggagaacgcccccgccgaaagggccgagctaacggtccccgagatgcgccagtggctgcgcaactgggtgggtaaggccgtcggaaaggcaccggactcgatcgacgaatcggtgcccatggtggagctgggtctgtcgtcgcgcgatgccgtcgcgatggccgccgacatagaagacctgaccggggtcacgctgtcggtcgcggtggcgttcgcgcatccgaccatcgaatcgctggccacccggatcatcgagggcgagccggagaccgacctagcgggcgatgacgccgaagactggtcgcgcaccggcccggccgagcgcgtcgacatcgcgatcgtgggcttgtccacccgcttcccgggcgagatgaacacccccgagcagacctggcaggcgctgctggaaggccgcgacgggatcaccgacctgcccgacgggcgctggtcggaattcctcgaagagccgcggctggccgcgcgggtcgccggggcccgcacccggggcggctacctgaaggacatcaagggcttcgattcggagttcttcgcggtggccaagaccgaagccgacaacatcgacccgcagcagcggatggcgctggagctgacctgggaggcgctcgagcacgcccgcatcccggcgtcgagcctgcgcggccaggccgtcggtgtgtacatcggcagctccaccaacgactacagcttcctggcggtgtcggacccgacggtcgcgcacccgtatgcgatcaccggcaccagcagctcgatcatcgccaaccgggtgtcctacttctacgacttccacggaccgtcggtcaccattgacaccgcgtgctcgagttcgctggtggccatccaccagggggtgcaggcgctgcgcaacggcgaggccgacgtagtggtcgccggcggggtgaacgcgttgatcacaccgatggtcaccctgggtttcgacgagatcggtgcggtgctggcgcccgacggccggatcaagtcgttctcagccgacgccgacggctacacccgctccgaaggcggcggcatgctggtgctcaagcgggtcgacgacgcccgccgcgacggcgacgcgatcctggccgtgatcgccggcagcgcggtcaaccacgacggccggtccaacggcctgatcgcacccaaccaggacgcgcaggccgacgtgctgcgccgggcctacaaggacgccggcatcgatccgcgcaccgtcgactacatcgaggcgcacggcaccggcaccatcctcggcgacccaatcgaggccgaggcgctgggccgggtggtcggtaggggccgtccggccgatcggccggcgctgctgggtgcggtgaaaaccaacgtcgggcacctggaatcggcggccggcgcggccagcatggccaaggtggtgctggcgctgcagcacgacaaactgccgccgtcgatcaacttcgccggccccagcccctacatcgacttcgacgcgatgcggttgaagatgatcaccacgcccaccgactggccgcgatacggcggctacgcgctggccggggtgtccagcttcggcttcggcggcgccaacgcgcacgtggtggtgcgcgaggtcctgccgcgtgacgtggtggaaaaggaaccggaacccgagccggaacccaaggcggccgccgaacccgccgaggcgcccacgttggcaggccacgcgctgcggttcgacgagttcggcaacatcatcaccgactcggcggtcgccgaagagccggagcccgaactgcccggagtcaccgaggaggcgctgcggctcaaggaagccgcgttggaagagcttgcggcccaagaggttacggcaccattggtcccgttggcggtgtcggcgtttctgacgtcccgcaagaaggcggcggccgccgagttggcggactggatgcaaagcccggaaggccaggcctcctcgctggaatcgatcggcaggtcgttgtcgcggcgcaaccacggccgttcccgcgcggtggtgttggcccacgaccacgacgaggccatcaagggcctgcgcgcggtcgccgcgggcaagcaggcgccgaacgtgttcagcgtcgacgggccggtgaccaccggcccggtctgggtgctcgccggattcggcgcccagcatcgcaagatgggcaagagcctgtacctgcgcaacgaggtgttcgcggcgtggatcgagaaggtcgacgccctggtccaagacgagctgggctactcggtgctggagctgatcctggacgacgcgcaggactacggcatcgagaccacccaggtcaccatcttcgcgatccagatcgcgctgggtgagctgctgcgccatcacggcgccaaaccggccgcggtcatcggccagtcgctgggtgaggccgcgtcggcctacttcgccggcgggctgtcgctgcgggatgccacccgggcgatctgctcgcgctcgcacctgatgggcgagggtgaggcgatgctgttcggcgagtacatccggttgatggcgctggtggaatactccgccgacgaaatcagagaagtgttctccgacttccccgatctggaggtgtgtgtctacgccgcgcccacccagacggtcatcggcggcccccccgagcaggtggacgcgatccttgcccgcgccgaggccgagggcaagttcgcccgcaaattcgcgaccaagggcgccagccacacctcgcagatggacccgctgctgggcgagctcaccgcggagctgcaaggcatcaagccgacgagcccgacgtgtgggatcttctcgacggtgcacgagggccgctacatcaaacccggcggcgaacccatccacgacgtcgaatactggaagaaggggctgcggcattccgtctacttcacccacggcatccgcaacgccgtcgacagcgggcacaccaccttcctggagctggcacccaatccggtggcgctgatgcaggtcgccctgaccaccgccgatgccgggctgcatgacgcccagttgatcccgacgctggcccgcaagcaagacgaggtctcctcgatggtctcgaccatggcgcagctgtatgtgtacggccacgacctggacatacgcacgctgtttagccgcgccagtgggccgcaggattacgcgaacattccgccgacccggttcaagcgcaaggagcactggctgcccgcgcacttctccggcgacggctcgacgtacatgccgggcacccatgtcgccctgccggatgggcggcacgtctgggagtacgcgccgcgggacggcaatgtggacttggccgcgttggtcagggccgccgccgcccacgtgcttccggacgcgcaactgaccgccgccgagcagcgcgcggtgcccggcgacggcgcccggctggtgacgacgatgacccgtcaccccggcggcgcctcggtgcaggtgcacgcccgcatcgacgagtccttcacgctggtctacgacgccctggtgtcccgagcggggtccgaatcggtgttgcccaccgcggtgggtgcggcgacggcgatcgcggttgcggacggggcgcctgtcgcgccggaaacgcccgccgaagacgcggacgccgagacgctttcggacagcctgaccacccgttacatgccgtccggcatgacccgatggtcgcctgattccggtgagaccatcgccgagcggctgggcctgattgtcgggtctgcgatgggctatgagcccgaggacctgccgtgggaggtgccgctgatcgagcttggcctggactcgctgatggcggtgcgcatcaaaaaccgcgtcgagtacgacttcgacctgccaccgatccagctgaccgcggtgcgcgacgccaacctctacaacgtggagaagctgatcgaatacgcggtcgagcaccgtgacgaggtgcagcagctgcacgagcaccagaaaacccagaccgctgaggagatcgcgcgggcccaggccgaattgctgcatggcaaggtgggcaagaccgagccggtcgactcggaagccggggttgcgctcccgtcgccgcaaaacggcgagcagccaaacccgacagggcccgcgctcaacgtcgacgtgccgccgcgggacgctgccgagcgggtcaccttcgccacctgggcgatcgtcaccggcaagtccccgggcggcatcttcaacgagctgcccaggctggacgacgaggccgcggccaagattgcgcagcggctttccgagcgcgccgaaggcccgatcaccgccgaggacgtgctgacgtcgtcgaacatcgaggcgctggccgacaaggtgcgcacgtatttggaggccgggcagatcgatgggttcgtccgcaccctgcgggcgcggcccgaagcaggcgggaaggtgccggtgttcgtgtttcatccggccggcggctcgacggtggtgtacgagccgctgctgggccggctgccggcggacaccccaatgtatggcttcgaacgggtcgaggggtcgatcgaagagcgtgcacagcagtacgtgccgaagctgatcgagatgcagggcgacgggccctatgtcctggtgggttggtcgctgggcggtgtgctggcctacgcgtgcgcgatcggtttgcggcggctgggcaaggacgtgcggttcgtcgggctgatcgacgcggtgcgcgccggtgaggagatcccgcagaccaaggaggagatccgcaagcgctgggaccgctacgccgccttcgccgagaagacgttcaacgtgaccatcccggcgatcccgtacgagcagctcgaggagctcgacgacgagggccaggtccggttcgtgctggacgccgtcagccagtccggtgtgcagatcccggccgggatcatcgaacaccaacgcacgtcgtatctggacaaccgggcgatcgacaccgcccagatccagccgtacgacgggcatgtcaccctctacatggccgatcgctaccatgacgacgcgatcatgttcgagccccgctacgccgtgcgccagccggacggcgggtggggcgagtacgtttccgacctcgaggtggtgccgatcggtggcgagcacattcaggccatcgacgagccgatcatcgccaaggtgggcgaacacatgagccgcgcgttggggcagatcgaggccgatcgaacaagtgaggtaggcaagcagtga

SEQ ID NO: 533 - DNA, 900 bp, Mycobacterium Tuberculosis
atgaagggtcggtcggcgctgctgcgggcgctctggattgccgcactgtcattcgggttgggcggtgtcgcggtagccgcggaacccaccgccaaggccgccccatacgagaacctgatggtgccgtcgccctcgatgggccgggacatcccggtggccttcctagccggtgggccgcacgcggtgtatctgctggacgccttcaacgccggcccggatgtcagtaactgggtcaccgcgggtaacgcgatgaacacgttggcgggcaaggggatttcggtggtggcaccggccggtggtgcgtacagcatgtacaccaactgggagcaggatggcagcaagcagtgggacaccttcttgtccgctgagctgcccgactggctggccgctaaccggggcttggcccccggtggccatgcggccgttggcgccgctcagggcggttacggggcgatggcgctggcggccttccaccccgaccgcttcggcttcgctggctcgatgtcgggctttttgtacccgtcgaacaccaccaccaacggtgcgatcgcggcgggcatgcagcaattcggcggtgtggacaccaacggaatgtggggagcaccacagctgggtcggtggaagtggcacgacccgtgggtgcatgccagcctgctggcgcaaaacaacacccgggtgtgggtgtggagcccgaccaacccgggagccagcgatcccgccgccatgatcggccaagccgccgaggcgatgggtaacagccgcatgttctacaaccagtatcgcagcgtcggcgggcacaacggacacttcgacttcccagccagcggtgacaacggctggggctcgtgggcgccccagctgggcgctatgtcgggcgatatcgtcggtgcgatccgctaa

SEQ ID NO: 534 - DNA, 1017 bp, Mycobacterium Tuberculosis
atgcagcttgttgacagggttcgtggcgccgtcacgggtatgtcgcgtcgactcgtggtcggggccgtcggcgcggccctagtgtcgggtctggtcggcgccgtcggtggcacggcgaccgcgggggcattttcccggccgggcttgccggtggagtacctgcaggtgccgtcgccgtcgatgggccgtgacatcaaggtccaattccaaagtggtggtgccaactcgcccgccctgtacctgctcgacggcctgcgcgcgcaggacgacttcagcggctgggacatcaacaccccggcgttcgagtggtacgaccagtcgggcctgtcggtggtcatgccggtgggtggccagtcaagcttctactccgactggtaccagcccgcctgcggcaaggccggttgccagacttacaagtgggagaccttcctgaccagcgagctgccggggtggctgcaggccaacaggcacgtcaagcccaccggaagcgccgtcgtcggtctttcgatggctgcttcttcggcgctgacgctggcgatctatcacccccagcagttcgtctacgcgggagcgatgtcgggcctgttggacccctcccaggcgatgggtcccaccctgatcggcctggcgatgggtgacgctggcggctacaaggcctccgacatgtggggcccgaaggaggacccggcgtggcagcgcaacgacccgctgttgaacgtcgggaagctgatcgccaacaacacccgcgtctgggtgtactgcggcaacggcaagccgtcggatctgggtggcaacaacctgccggccaagttcctcgagggcttcgtgcggaccagcaacatcaagttccaagacgcctacaacgccggtggcggccacaacggcgtgttcgacttcccggacagcggtacgcacagctgggagtactggggcgcgcagctcaacgctatgaagcccgacctgcaacgggcactgggtgccacgcccaacaccgggcccgcgccccagggcgcctag

SEQ ID NO: 535 - DNA, 1884 bp, Mycobacterium Tuberculosis
atggtccgggtcagcttgtggctgtcggtgacggcggtcgccgtgctgttcggctgggggagctggcaacgtcgctggatcgctgacgacggactgatcgtcctgcggacggtacgcaacctattggccggcaacggaccggtcttcaaccagggcgagcgagtcgaagcgaacacctcgacagcgtggacgtatctgctgtatgtgggcggctgggtgggcgggccgatgcgcctggagtacgtggcgttggccctggccatggtgctttcgctgctgggaatggtgctgctcatgctggggaccggccggttgtacgcacccagcctgcggggccgtcgggcgatcatgcttccggccggggcgctggtatatatcgcggtgccaccggcccgcgacttcgccacctccggcctggagagcgggctggtgttggcctatctggggctgttgtggtggatgatggtctgctggtcacagccgctgcgggcccgcccggacagccagatgttcctcggcgcgttggccttcgtcgccggatgcagcgtgctagtgcggccggaattcgcgctgatcggcgggctggcgctgatcatgatgttgatcgccgcgcggacctggcgtcgccgcgtgctgatcgtgctggccggcggattcttgccggtggcctaccagatcttccggatgggctattacggactgctggttccgagtaccgcgctggccaaggatgccgcgggcgacaagtggtcgcaaggcatgatctacgtgtcgaacttcaaccggccgtacgcactgtgggtgccgttggtgctgtcggtgccgctgggattgctgttgatgacggcgcgccgccggccgtcgttcctgcgtcccgtgctggcacccgactacggtcgggtggcccgggcggtgcaaagtccgccggccgtggtggctttcatcgtcggcagcggcgtgctgcaggcgctgtactggattcggcaaggcggcgactttatgcacggccgggtgttgctggcgccgctgttttgtttgctggccccggtgggggtcattcctattttgctgcccgacggtaaggacttttcgcgggagaccggtcgctggctagtcggcgcgctcagcgggctctggctggggatcgcgggttggtcgctgtgggcggcaaactcgccgggcatgggtgacgacgccacccgggtcacctattcgggcatcgtcgacgagcgccgcttctacgcccaggccaccgggcacgcgcatccgctgaccgccgcggactacctcgattacccgcgaatggctgccgtgcttacagcgctcaacaacaccccggaaggggcgttgctattgccgtcgggcaactacaaccagtgggacctggtgccgatgatccggccctcgtcggggaccgcgccgggtggcaagccggcgccgaaaccgcagcacgcagtgtttttcaccaacatgggcatgctaggcatgaacgtcgggctcgatgtccgggtgatcgaccaaatcgggctggtaaacccattggccgcgcacaccgagcggctgaagcatgcccgtatcggccatgacaagaatctgttcccggactgggtgatcgccgacggaccctgggtgaagtggtacccgggtattcccggctacatcgaccagcagtgggtcacgcaagccgaagcggccctgcaatgccccgcgactcgggcggtgcttaattctgtgcgcgccccgatcaccctgcaccgattcctctccaacgtgttgcattcctacgagttcacccgttaccgcatcgaccgcgttccgcgctatgaattggtccggtgtgggctcgatgttcccgacgggcccggcccgccaccgcgggagtga

SEQ ID NO: 536 - DNA, 855 bp, Mycobacterium Tuberculosis
gtgccgaaccgacgccgacgcaagctctcgacagccatgagcgcggtcgccgccctggcagttgcaagtccttgtgcatattttcttgtctacgaatcaaccgaaacgaccgagcggcccgagcaccatgaattcaagcaggcggcggtgttgaccgacctgcccggcgagctgatgtccgcgctatcgcaggggttgtcccagttcgggatcaacataccgccggtgcccagcctgaccgggagcggcgatgccagcacgggtctaaccggtcctggcctgactagtccgggattgaccagcccgggattgaccagcccgggcctcaccgaccctgcccttaccagtccgggcctgacgccaaccctgcccggatcactcgccgcgcccggcaccaccctggcgccaacgcccggcgtgggggccaatccggcgctcaccaaccccgcgctgaccagcccgaccggggcgacgccgggattgaccagcccgacgggtttggatcccgcgctgggcggcgccaacgaaatcccgattacgacgccggtcggattggatcccggggctgacggcacctatccgatcctcggtgatccaacactggggaccataccgagcagccccgccaccacctccaccggcggcggcggtctcgtcaacgacgtgatgcaggtggccaacgagttgggcgccagtcaggctatcgacctgctaaaaggtgtgctaatgccgtcgatcatgcaggccgtccagaatggcggcgcggccgcgccggcagccagcccgccggtcccgcccatccccgcggccgcggcggtgccaccgacggacccaatcaccgtgccggtcgcctaa

SEQ ID NO: 537 - DNA, 1620 bp, Mycobacterium Tuberculosis
atggcagcgaccgtcgtcatcgtcgcgtggatagcgaatcgtccacccgccagctcccatgaaccatcgccgacgcccaacacccagctcgccgagcagccactgatcgggctcggcggcggcgtcacggtacgcgaactcacccaggacacaccgttttcattggtggcgttgactggcgacctggccggtacctccgctcgtgtgcgcgccaagcgcccggacggtgactgggggccgtggtatcagaccgagtatgaaaccgaaccacgcgatccggcgggcaccgacgggtccgtggaacttggaggactcaatccgggtccccgtagcaccgatccggtgttcgtgggcaccaccaccaccgtgcaggtcgcggtgactcgcccgatcgacgcaccgataactcaaccgccggcggggcggccgcccaacgacttgctcgacagcggtttgggataccgtccagccaccaaggaacagccattcgggcagaacatctccgcgatcctgatctcgccgccgcaagcgccgcccggaacgcagtggacgccaccaaccgcagtcaccatggcaggccagccgccggccatcatcagccgggcggaatggggcgcagacgagtcactgcgatgcgaaacaccggagtacgacaggggggttcgtgccgcggtggtccaccacaccgcggggagcaacgactactctccgctggagtccgccggcatagtcaaagccatctacacttaccacagcaagaccctgggctggtgtgacatcgcgtacaacgccctcgtcgacaagtacggccaggtgttcgagggtagcgccggcggcctcaccaagccggtcgaagggttccacaccggcggattcaaccgcaacacctggggggttgccatgatcggcaacttcgacgatgtggcccccacgccgatccagatccgaaccgtcggccggctgctcggctggcggctgggcatggacgacgtcgatcccaggagcatggtggatctgcagtcagcgggtagctcgtacaccacgtttccgggtggcgccatagcgcgattgcccgccatcttcacccatcgcgacgtcggcaacaccgactgtccgggcaacgccgcctacgctgtgatggacgagatccgggacatcgcagcacatttcaacgacccgccggaggagctgatcaaggcgctggaaggcggcgcgatctatcagcgctggcaggcgttgggcggcatgaacagcgcgctgggtgcaccgacctcgccggaggccgacgccgcggatggggcgcggtatgcaaccttcgctaagggcgccatgtattggtcgccggtgaccgacgctcagccgatcacgggggcaatctatgaggcctgggcttcgcagagctacgaacgcggcccgctgggactgccgaccagcgcggagatccaggagccgctgcagatcacgcagaactttcaacacggaaccttgaacttcgagcgcctcaccggcaatgtcaccgaagtcgtcgacgggatcacgacgccactggcgacgcggcccccgagcggcccgacggtgccgcccgaacacttcacgctgccaacgcatccgatcacctga

SEQ ID NO: 538 - DNA, 822 bp, Mycobacterium Tuberculosis
ttgaaaccgactgtgccggcgctcgtcgcgtgtgacgtcgacggaaccctgctcgatgacggagaaaccgtcaccaaacgcactcgcgacgcggtgcatgccgcggtagacgccggcacgcacttcatcctggccaccggccggccgccgcgctgggtgcgacccatcgtcgatgccctcggcttcgcgccgatggcggtgtgcgccaacggcgccgtcatctacgaccccgggaccgatcgggtgatgtcggtgcgcaccctgcccgtcgacgccctggcaacgttggccgaagttgcgacccgcgtcataccgggtgcgggactggcggtcgagcggatcggcgagcgcgcacacgacacggcgaccccccagttcgtcagctcgccgggctacgagcatgcgtggctgaatccggacaacaccgaagtgtcgatcgaccacctgctcagcgcgccggcgatcaaactgctgatccgtaaagccggtgctgccagtgccgacatggccgccgaactggctaagcatgtcggtttcgagggcgatatcacctactcgaccaataacgggctggtggagatcgtgccgctcggtatcagcaaggccaccggtgtcgacgagattgcccggccgcttggaatttccgacgcggaggtggtggcgttcggcgacatgcccaacgacgtgccgatgctgctgcgggccggtttgggtgtggcgatgggtaacgcgcatcccgacgcgctggccgtcgccgacgaggtcactgcacccaatagcgaggacggcgtcgcgcgggtgctggagcgctggtggtcctag

SEQ ID NO: 539 - DNA, 1551 bp, Mycobacterium Tuberculosis
gtgcaggtcacaagcgttggtcacgccggctttctgatccagacccaggccggcagcatcctgtgcgacccttgggtcaatccggcctactttgcgtcttggtttccgttccccgacaacagcgggctggactggggcgctttgggtgagtgcgattatctgtatgtctcgcacctacataaggaccacttcgacgcggaaaatctacgagcgcacgtcaacaaggacgccgtcgtgctgctgcccgactttccggtacccgacctgcgaaatgagttgcagaagttaggatttcatcggttcttcgaaaccaccgactcggtcaaacaccgcctgaggggacccaacggcgatctcgacgtgatgatcatcgcactgcgggcccccgccgacggtccgatcggcgactcggcgctagtcgttgccgacggcgaaacaacggctttcaacatgaacgacgcccgcccggtcgatttggacgtgctggcatcggagttcggtcacatcgacgtgcatatgctgcagtactcgggcgcgatctggtacccgatggtctacgacatgccggcgcgcgcgaaggatgcgttcggcgcccaaaagcggcaacggcagatggaccgtgctcgccagtacatcgcgcaggtgggagcgacgtgggtggtgccgtcggcggggccgccatgctttttagcccccgagctgcgccacctcaacgacgacggtagcgatccggccaatatcttccccgaccagatggtgttcctggatcagatgcgggcgcacggccaggacggcgggctgctgatgatccccggctcgactgcggatttcactggtacaaccctgaattcattgcgccatccactgcccgccgaacaggtcgaggccatctttaccaccgacaaagccgcatacatcgctgactatgccgaccggatggcgccggtgctcgccgcgcaaaaggctggctgggccgccgccgccggcgagccactgctgcagccgctgcgcaccctgttcgagccgatcatgctgcaaagcaacgagatctgcgacggcatcggatacccggtcgagctcgccatcggtcccgaaaccattgttttggactttccgaaaagagctgtacgagaaccgattcccgacgagaggttccgctacgggttcgcgatcgcgccggagctggtgcgcacggtgctgcgcgacaacgaacccgactgggtcaacaccatcttcttatccacccgatttcgggcatggcgggttggtggctacaacgaatacctttacacgttcttcaagtgtctgaccgacgaacgcatcgcctacgccgacggctggttcgccgaggcccacgatgactcctcatcgatcaccctgaacggttgggagatccagcgccgctgcccccatctcaaagccgacctatcgaaattcggtgtggtggaaggcaacacgctcacttgtaacctgcacggctggcagtggcgtctggacgacggtcgctgcctcaccgcccggggccatcaactacgcagttcacggccatga

SEQ ID NO: 540 - DNA, 612 bp, Mycobacterium Tuberculosis
ttgtcggtggtgtgctgtaggaacagatggatgaatttggcggtgtgggcggagcgcaacggtgttgcgtgggtgatcgcgtatcgctggtttcgagccgggctgttgccggttccggcgcagcgagtgggtcggctcattctggtgaacgatccggcagtcgaggagtctgggcgcgggcggacgttggtgtacgcgcgggtatcgtcagcggatcagaggtccgatctggatcggcgggtcgcgcgggtgaccgcgtgggccacatcgcaacatctctctgtcgacaaggtggtggccgagggtggttgggcgttgaatggacatcgccgtaagttttttgcgctgctgggtgatccggtggtgacgcggatcgtggtggagcaccgggatcggttctgctggtttggctctgagtacgtcgaggccgctcttgtcgcccagggccgggaattggtggtggtcgacttggctgaggttgatgacgacctggtgggcgatatgaccgagatcctgacctcgatgtgtgctcggctctatggtgaacgcgctgcacagaacggggccaagcgtgcccttgctgctgcggtcggggacgcggaggcagcttga

SEQ ID NO: 541 - DNA, 1008 bp, Mycobacterium Tuberculosis
atggacccggtaacagcgctgcggcagatcgcctattacaaggaccggaaccgccacgacccgaggcgggtgatggcctatcgcaatgccgccgacattatcgagggccttgacgacgcggcgcggcagcggcacggccaggccaacagctggcagtcgctggcgggtatcggtcccaaaaccgcgaaagtcatcgcccaggcctggtctggccgcgagccggacctgctggctgaattacgcgctgacgctgaggatctcggtggaggggcgatccgtgccgcattgcgcggggatctgcatctgcattcgaactggtcggacgggtccgcgccgatcgaggagatgatggccaccgcggcggcgctaggtcaccagtactgcgcattgaccgatcactcaccgcggttgacgatcgccaacggcctgtctccggaccggttgcgcaagcagctggacgtgatcgacgagctgcgcgagaagttcgcgccgctgcgcatcctgaccgggatcgaggtcgacatcctcgaagacgggagcttggaccaggaacccgagatgctggaccgcctcgacatcgtggtggccagcgtgcactccaagctgtcgatggattcggcagcgatgacgcgacggatggtgcgcgccgtggccaacggtcacaccgacgtgctgggccactgcaccggccggctgatcgccggcaatcgtggcatccggccagaatcgaagttcgatgcagaggcggtgttcaccgcctgccgtgagcacggcaccgccgtggagatcaactcccgtccggaacgccgagacccaccgacgcgcctgttgcacctagcgcgcgacatcggctgcgtgttcagcatcgacaccgacgcgcacgcacccggccagctggacttcctcggctacggcgcccagcgcgccttggacgcggaggtgcccgccgaccggatcgtcaacacctggccggccgacacgctcctggcgtggaccgggtcgcattag

SEQ ID NO: 542 - DNA, 1173 bp, Mycobacterium Tuberculosis
atgtacgagcgtgacgaattcctgcgcgatcggatccgaccacaccagcccggcaccccgcggggatactcgccccgtccgccgtccggagatcgctgccccgcgccaccgcctggccggcacgctgctgccgctacgccaccagggccgccgcgcctgccttcagctccactgcgtccattgccggacccggcttggccacgccagccggaggccccgccaccgagcacctgggccgaccccgccctggcgccgatacgcagtcggacgcgacccggcgagcgtggttggcgacgcatggtgcggctggtcacctttggccttgtcggcctgggccggtcgggcatgcagcgccaggaggcccaattcgaagcaacgatacgaaccgtcctgcatggcaaccacaaggtcgccgtgctgggcaaaggaggtgtgggaaagacgtcggttgcggcgtgcgtcggatcgatccttgccgaactgcgccagcaggaccgtatcgtcgggatcgacgccgacaccgccttcggcaggctgagcagccgaatcgatcctcgagcagctggttcgttctgggagctgaccaccgacacgaatctgcggtccttcaccgatatcaccgcgcgcctgggccgaaattccgcgggactgtacgtcctggcaggccagccggcatccggtccgcgccgggtgctcgatccggccatctaccgcgaagccgccctaaggttggatcaccatttcgcaatctcggtgatcgactgcggttcctccatggaggcggcggtcacccaggaagtattgcgcgatgtggatgctctgatcgtggtgtcctcgccctgggcggatggtgcctccgctgccgccaacaccatcgaatggctgtcggattatggcctgacaggtttgttgcgacgcagcatcgtggtgctcaacgattcggacggacacgccgacaagcgcaccaagtcattgctggcccaggaattcatcgaccacgggcagcctgtggtcgaggtgcccttcgatccccatttgcggcccgggggggtcatcgatatgagccacgaaatggccccgacgacgcggctgaaaatcctgcaggtcgccgcgacggtgacggcgtacttcgcgtcgcgacccgccgacgcacacggcagcccgccccggtga

SEQ ID NO: 543 - DNA, 327 bp, Mycobacterium Tuberculosis
gtgacctggctggctgacccggtcggcaacagcaggatcgcccgagcgcaggcctgcaaaacgtcaatctcggcgcccatcgtcgaatcctggcgggcgcaacgcggcgcgcaatgtggacagcgcgagaaatcttgtcgatgttctcgcgctgtccacatccagggcatctcaccgccactgttccgcagacccctcgaaccagcggtccaggcggcggttgcgtcatgccgattgggcagacacccggtggtcgcgcaccgggtaaccgttgcgctcggccagggatcgcagctggcccaacgcgaatgcccgcgcccggcctga

SEQ ID NO: 544 - DNA, 351 bp, Mycobacterium Tuberculosis
atgcgatacgctttcgcggcagaggctacaacctgcaacgctttctggaggaacgtagacatgacagtaaccgccctgtatgaggtcccgctcggcgtttgcacgcaagatcccgatcgttggacgacgactcccgacgacgaggccaagaccctgtgccgggcttgcccgcgccggtggctgtgtgcacgcgacgccgtcgagtccgcgggtgcggaagggctgtgggcaggggtcgtaattcccgaatcaggccgggcgcgggcattcgcgttgggccagctgcgatccctggccgagcgcaacggttacccggtgcgcgaccaccgggtgtctgcccaatcggcatga

SEQ ID NO: 545 - DNA, 1209 bp, Mycobacterium Tuberculosis
atggcatcgggtagcggtctttgcaagacgacgagtaactttatttggggccagttactcttgcttggagagggaatccccgacccaggcgacattttcaacaccggttcgtcgctgttcaaacaaatcagcgacaaaatgggactcgccattccgggcaccaactggatcggccaagcggcggaagcttacctaaaccagaacatcgcgcaacaacttcgcgcacaggtgatgggcgatctcgacaaattaaccggcaacatgatctcgaatcaggccaaatacgtctccgatacgcgcgacgtcctgcgggccatgaagaagatgattgacggtgtctacaaggtttgtaagggcctcgaaaagattccgctgctcggccacttgtggtcgtgggagctcgcaatccctatgtccggcatcgcgatggccgttgtcggcggcgcattgctctatctaacgattatgacgctgatgaatgcgaccaacctgaggggaattctcggcaggctgatcgagatgttgacgaccttgccaaagttccccggcctgcccgggttgcccagcctgcccgacatcatcgacggcctctggccgccgaagttgcccgacattccgatccccggcctgcccgacatcccgggcctacccgacttcaaatggccgcccacccccggcagcccgttgttccccgacctcccgtcgttcccagggttccccgggttcccggagttccccgccatccccgggttccccgcactgcccgggttgcccagcattcccaacttgttccccggcttgccgggtctgggcgacctgctgcccggcgtaggcgatttgggcaagttacccacctggactgagctggccgctttgcctgacttcttgggcggcttcgccggcctgcccagcttgggttttggcaatctgctcagctttgccagtttgcccaccgtgggtcaggtgaccgccaccatgggtcagctgcaacagctcgtggcggccggcggtggccccagccaactggccagcatgggcagccaacaagcgcaactgatctcgtcgcaggcccagcaaggaggccagcagcacgccaccctcgtgagcgacaagaaggaagacgaggaaggcgtggccgaggcggagcgtgcacccatcgacgctggcaccgcggccagccaacgggggcaggaggggaccgtcctttga

SEQ ID NO: 546 - DNA, 2244 bp, Mycobacterium Tuberculosis
atgacgaccaagaagttcactcccaccattacccgtggcccccggttgaccccgggcgagatcagcctcacgccgcccgatgacctgggcatcgacatcccaccgtcgggcgtccaaaagatccttccctacgtgatgggtggcgccatgctcggcatgatcgccatcatggtggccggcggcaccaggcagctgtcgccgtacatgttgatgatgccgctgatgatgatcgtgatgatggtcggcggtctggccggtagcaccggtggtggcggcaagaaggtgcccgaaatcaacgccgaccgcaaggagtacctgcggtatttggcaggactacgcacccgagtgacgtcctcggccacctctcaggtggcgttcttctcctaccacgcaccgcatcccgaggatctgttgtcgatcgtcggcacccaacggcagtggtcccggccggccaacgccgacttctatgcggccacccgaatcggtatcggtgaccagccggcggtggatcgattattgaagccggccgtcggcggggagttggccgccgccagcgcagcacctcagccgttcctggagccggtcagtcatatgtgggtggtcaagtttctacgaacccatggattgatccatgactgcccgaaactgctgcaactccgtacctttccgactatcgcgatcggcggggacttggcgggggcagccggcctgatgacggcgatgatctgtcacctagccgtgttccacccaccggacctgctgcagatccgggtgctcaccgaggaacccgacgaccccgactggtcctggctcaaatggcttccgcacgtacagcaccagaccgaaaccgatgcggccgggtccacccggctgatcttcacgcgccaggaaggtctgtcggacctggccgcgcgcgggccacacgcacccgattcgcttcccggcggcccctacgtagtcgtcgtcgacctgaccggcggcaaggctggattcccgcccgacggtagggccggtgtcacggtgatcacgttgggcaaccatcgcggctcggcctaccgcatcagggtgcacgaggatgggacggctgatgaccggctccctaaccaatcgtttcgccaggtgacatcggtcaccgatcggatgtcgccgcagcaagccagccgtatcgcgcgaaagttggccggatggtccatcacgggcaccatcctcgacaagacgtcgcgggtccagaagaaggtggccaccgactggcaccagctggtcggtgcgcaaagtgtcgaggagataacaccttcccgctggaggatgtacaccgacaccgaccgtgaccggctaaagatcccgtttggtcatgaactaaagaccggcaacgtcatgtacctggacatcaaagagggcgcggaattcggcgccggaccgcacggcatgctcatcgggaccacggggtctgggaagtccgaattcctgcgcaccctgatcctgtcgctggtggcaatgactcatccagatcaggtgaatctcctgctcaccgacttcaaaggtggttcaaccttcctgggaatggaaaagcttccgcacactgccgctgtcgtcaccaacatggccgaggaagccgagctcgtcagccggatgggcgaggtgttgaccggagaactcgatcggcgccagtcgatcctccgacaggccgggatgaaagtcggcgcggccggagccctgtccggcgtggccgaatacgagaagtaccgcgaacgcggtgccgacctacccccgctgccaacgcttttcgtcgtcgtcgacgagttcgccgagctgttgcagagtcacccggacttcatcgggctgttcgaccggatctgccgcgtcgggcggtcgctgagggtccatctgctgctggctacccagtcgctgcagaccggcggtgttcgcatcgacaaactggagccaaacctgacatatcgaatcgcattgcgcaccaccagctctcatgaatccaaggcggtaatcggcacaccggaggcgcagtacatcaccaacaaggagagcggtgtcgggtttctccgggtcggcatggaagacccggtcaagttcagcaccttctacatcagtgggccatacatgccgccggcggcaggcgtcgaaaccaatggtgaagccggagggcccggtcaacagaccactagacaagccgcgcgcattcacaggttcaccgcggcaccggttctcgaggaggcgccgacaccgtga

SEQ ID NO: 547 - DNA, 303 bp, Mycobacterium Tuberculosis
atggcagagatgaagaccgatgccgctaccctcgcgcaggaggcaggtaatttcgagcggatctccggcgacctgaaaacccagatcgaccaggtggagtcgacggcaggttcgttgcagggccagtggcgcggcgcggcggggacggccgcccaggccgcggtggtgcgcttccaagaagcagccaataagcagaagcaggaactcgacgagatctcgacgaatattcgtcaggccggcgtccaatactcgagggccgacgaggagcagcagcaggcgctgtcctcgcaaatgggcttctga

SEQ ID NO: 548 - DNA, 288 bp, Mycobacterium Tuberculosis
atgacagagcagcagtggaatttcgcgggtatcgaggccgcggcaagcgcaatccagggaaatgtcacgtccattcattccctccttgacgaggggaagcagtccctgaccaagctcgcagcggcctggggcggtagcggttcggaggcgtaccagggtgtccagcaaaaatgggacgccacggctaccgagctgaacaacgcgctgcagaacctggcgcggacgatcagcgaagccggtcaggcaatggcttcgaccgaaggcaacgtcactgggatgttcgcatag

SEQ ID NO: 549 - DNA, 843 bp, Mycobacterium Tuberculosis
atggctgaaccgttggccgtcgatcccaccggcttgagcgcagcggccgcgaaattggccggcctcgtttttccgcagcctccggcgccgatcgcggtcagcggaacggattcggtggtagcagcaatcaacgagaccatgccaagcatcgaatcgctggtcagtgacgggctgcccggcgtgaaagccgccctgactcgaacagcatccaacatgaacgcggcggcggacgtctatgcgaagaccgatcagtcactgggaaccagtttgagccagtatgcattcggctcgtcgggcgaaggcctggctggcgtcgcctcggtcggtggtcagccaagtcaggctacccagctgctgagcacacccgtgtcacaggtcacgacccagctcggcgagacggccgctgagctggcaccccgtgttgttgcgacggtgccgcaactcgttcagctggctccgcacgccgttcagatgtcgcaaaacgcatcccccatcgctcagacgatcagtcaaaccgcccaacaggccgcccagagcgcgcagggcggcagcggcccaatgcccgcacagcttgccagcgctgaaaaaccggccaccgagcaagcggagccggtccacgaagtgacaaacgacgatcagggcgaccagggcgacgtgcagccggccgaggtcgttgccgcggcacgtgacgaaggcgccggcgcatcaccgggccagcagcccggcgggggcgttcccgcgcaagccatggataccggagccggtgcccgcccagcggcgagtccgctggcggcccccgtcgatccgtcgactccggcaccctcaacaaccacaacgttgtag

SEQ ID NO: 550 - DNA, 348 bp, Mycobacterium Tuberculosis
gtgagcatggacgaattggacccgcatgtcgcccgggcgttgacgctggcggcgcggtttcagtcggccctagacgggacgctcaatcagatgaacaacggatccttccgcgccaccgacgaagccgagaccgtcgaagtgacgatcaatgggcaccagtggctcaccggcctgcgcatcgaagatggtttgctgaagaagctgggtgccgaggcggtggctcagcgggtcaacgaggcgctgcacaatgcgcaggccgcggcgtccgcgtataacgacgcggcgggcgagcagctgaccgctgcgttatcggccatgtcccgcgcgatgaacgaaggaatggcctaa

SEQ ID NO: 551 - DNA, 1860 bp, Mycobacterium Tuberculosis
atgtcgagaatggtggacacgatgggtgatttactcactgcgcgccggcatttcgatcgggcgatgacgatcaagaatggccagggatgcgtggcggcgttgcctgagtttgtggctgccaccgaggccgatccgtcgatggccgacgcgtggctgggtcgtatcgcctgcggtgaccgcgatctggcctcgcttaagcagctcaacgcccatagcgagtggctgcaccgcgagaccacgcggatcggccggacgttggccgctgaggtccagctgggaccatccatcgggatcacggtgaccgacgcatctcaggtggggctggcgctgtcgtcggcgttgacgatcgcgggggagtatgcgaaggccgatgccctgttagcaaaccgcgagctattggattcgtggcgcaactaccagtggcatcagctggctcgggcgttcctgatgtacgtcacgcagcgatggcccgacgtgttgtcgacggccgccgaggatctgccgccacaggcgatcgtcatgccggcggtgaccgcgtcgatttgtgcgctggcagcccacgccgccgcccatctcgggcaggggcgagtggccctggactggctggaccgggtggacgtgatcggacacagcaggtcatcggagcggttcggcgccgacgtgctcaccgcggcgatcggaccggccgatattccgctgctggtcgccgacttggcgtatgtgcgggggatggtgtaccggcaactgcatgaggaggacaaggcccagatctggctgtcgaaggccaccatcaacggggtgctcaccgacgccgccaaagaagccctggcggacccgaacctgcgcttgattgttaccgatgaacgaaccatcgccagccgctccgaccgttgggatgcttcgacggcgaaaagccgcgaccagctcgatgacgacaatgcagcgcagcggcgcggcgagctgctagccgagggccgggaactgctggccaaacaggtgggcctggcggcggtcaagcaagcggtatcggcgctggaagaccaactcgaggtgcgcatgatgcgcctagagcacggcctaccggtggaggggcagaccaaccacatgttgctggtggggccaccaggcacaggtaagacaaccaccgctgaagcgctcggcaagatctacgccggcatggggatcgtgcgtcaccccgaaattcgagaagttcgccgatcggacttctgtgggcactacatcggggagtcaggacccaagacgaacgagctgatcgaaaagtcactcgggcgaatcattttcatggacgagttctactcgctgatcgaacgtcatcaagacggaacaccggacatgatcggcatggaggcggtcaatcaactcctggttcaattggaaacacaccgattcgacttctgtttcatcggggccggctatgaggatcaggtggatgaattcctcaccgtgaacccgggtttggctggccggttcaaccgaaagctgcggttcgagtcttattcgccggtggagatcgtcgagattggacaccgctacgctacaccgcgcgccagccagctcgatgacgccgcacgggaggtattcctcgacgcggtcaccaccatccgtaactacaccacccctagtgggcagcacggtatcgacgctatgcaaaacggtcggttcgcccgcaacgtgatcgaacgcgccgaagggttccgggacacccgggtggttgcgcaaaaacgtgcgggccaaccggtatcggttcaggatctgcagatcatcaccgccaccgacatcgatgccgcgatacgcagcgtgtgctcagacaaccgagacatggccgcgatcgtttggtag

SEQ ID NO: 552 - DNA, 324 bp, Mycobacterium Tuberculosis
gtggcagacacaattcaggtaacaccgcagatgctgcgcagcaccgccaacgatatccaggcgaatatggagcaagccatgggaatcgccaagggctacctagccaaccaggaaaacgtcatgaaccccgccacctggtctggtaccggcgtcgttgcttcgcatatgacagccaccgagatcaccaatgaattgaacaaggtccttaccgggggcacgcgcctggccgagggcctcgtgcaggccgcagccctgatggagggacacgaggcggactcgcagacagcgtttcaggcgctgttcggcgctagccacggatcctga

SEQ ID NO: 553 - DNA, 633 bp, Mycobacterium Tuberculosis
atgatgcaacaagcggtgtcgggcattaccggcgcgctcggcggcgcggtcggcggcgtcatgggcccactcacgcagcttccccagcaggccatgcaagcggggcagggagcaatgcagccgctgatgagtgcgcttcaacagacctatggcgcggagggactggacgtcgcggacggggcgcggctggtggacagcatcgaaggtgagcccggcctcggcggcgagccgggcgctggtgacgtcggcgccggcggcgggggtggtggcaccaccccgacgggctatctgggtcccccacccgtgccgacgtcgtcgccaccgacgactccagccggggcgccggccaagtcggtgacgccggacccggttagtggcaccccgcgggcgtcggggccggccggcatgaccggcatgccgatggtgccgccgggcgcgttgggtgcgggcgcggaaggagccaataaggacaagccggtcgagaagcgggtgacgggctgtgccgaatggtcaaccggtcaagggccgcttaacagtaccgccgagtgttccggtgaaatctgccgacgacaagccggtggtcaccaagtcgacgcgacggatccttgttgtgccgaacgacgacaaggttaa

SEQ ID NO: 554 - DNA, 1443 bp, Mycobacterium Tuberculosis
gtgccggaagccgtccaggaagccgatctgctaaccgccgctgcggttgccttgaacaggcatgctgccttattgcgggaactcgggtcggtgttcgccgccgcgggacacgagttgtatctggtcggcggttcggtgcgagatgcactgttgggccggttgagccccgacctggacttcaccaccgacgcccgtcccgagcgggtgcaggagatcgtgcggccgtgggccgatgcggtgtgggataccggaatcgaattcggcaccgtcggcgtgggtaagagcgaccaccgcatggagatcaccacattccgtgccgacagctacgaccgggtttcgcgtcatccagaggtacgtttcggcgattgcctcgagggcgatctggtccgccgcgacttcaccacgaacgcaatggctgtgcgcgtcaccgccactgggccgggcgaattcctggatccgcttggtggcttggcggcgctgcgggccaaggtgttagacaccccggcggcgccgtcggggtcctttggcgacgatccgttgcggatgctgcgcgccgcgcggttcgtctcgcaacttggattcgcggtggcgccgcgggtgcgcgcggcgatcgaagagatggcgccgcagttggcccgaatcagcgccgaacgggtggccgccgagctggacaagctgctggtcggtgaggatccggccgcgggtatcgacctgatggtgcagagcggtatgggtgctgtggtcttgcctgaaatcggtgggatgcggatggcgatcgacgaacatcaccagcacaaggacgtctatcagcattccttgaccgtgctgcggcaggcgatcgcgctggaggacgacggcccggatctggtgttgcgctgggcggcgctgctgcacgacatcggcaagcccgccacccgccgtcacgaacccgacggtggggtgagcttccatcaccacgaagtggtcggcgccaagatggtgcgcaagcggatgcgggcgctgaagtattccaagcagatgatcgacgacatctcgcagctggtctacctgcatctgcggtttcacggctacggcgatgggaaatggaccgactctgcggtgcgccgctatgtcaccgacgccggggccctactgccacggctgcacaagctggtgcgcgccgactgcacgacccgcaacaagcgccgggccgcgcggttgcaggccagttacgaccggctggaagagcggatcgcggagctggccgcccaggaggatctggatcgggtgcgccccgacctggacggcaaccagatcatggcggtgctcgacattccggcgggcccgcaagtcggcgaggcgtggcgctacttgaaggagctgcggctagagcgcggcccgttgtccaccgaggaggcgacaaccgagctgctgtcctggtggaaatcacgggggaaccgctag

SEQ ID NO: 555 - DNA, 381 bp, Mycobacterium Tuberculosis
atgagcaaccggattgtgttagaacccagcgccgatcacccgatcaccatcgagccgaccaaccgacgggtgcaggtacgcgtcaatggcgaggtggtcgcggacacggccgcggcgctgtgcttgcaggaagccagttaccctgcagtgcaatatattccgttggccgacgtggtacaggataggctgatccgcaccgagaccagcacctattgcccgttcaagggtgaagccagctattacagcgtgactaccgacgccggcgacatcgtcgacgacgtgatgtggacgtacgaaaacccttatccggcggtagcggcgatcgcggggcatgtcgcgtgctatccggacaaagccgaaatcagcatcttcccggggtag

SEQ ID NO: 556 - DNA, 1101 bp, Mycobacterium Tuberculosis
atgacagatccgcagacgcagagcaccagggtcggggtggttgccgagtcggggcccgacgaacgacgggtcgcgctggttcccaaggcggtcgcgtcgctggtgaaccgtggtgtggcggtcgtggtcgaggccggtgcgggcgagcgcgcgctgcttcccgatgagctctacaccgctgtcggtgccagcatcggggatgcttgggccgccgacgtcgttgtcaaggtcgcgccgccgacggcggcggaggtcggccggttgcgcggtgggcagacactgatcggctttctagcgccccgtaatgctgacaactcgatcggcgcgctgacccaggccggggtgcaggcgttcgcgctcgaggccatcccgcgcatctcgcgggcgcaggtgatggacgcgctgtcgtcgcaagccaacgtgtctgggtataaggctgtgctgctcgcggcctcggaatcgacccggttctttccgatgctgacgacggcggccggaacggtgaagccggccacggtgctggtgctcggcgtcggcgtggccggcctgcaggcgctggcgacggccaaacggctaggcgcgcgcaccacgggctacgatgtgcgtcccgaggtggccgaccaggtccgatcggtgggcgctcaatggcttgatttgggcatctcagcgtccggtgagggcggttacgcccgcgaactgaccgacgacgagcgcgcccagcagcaaaaggcattggaagaagcgatcagtggcttcgacgtggtgatcaccaccgcgctggtgccgggccgcccggcgccaacgttggtgaccgccgctgcagtggaagcgatgaagcctggcagcgtggtggtggatctcgccggcgagacgggcggcaactgcgaattgaccgagcccggccggacagtcgtcaagcacgacgtcaccattgccgcaccgctgaacctgccggccacgatgcccgagcacgccagcgagctctacagcaagaacatcaccgcgctactcgacttgttgatcaaagacggcaggctggccccggacttcgacgacgaggtgattgcccagtcgtgtgtcacccgcgggaaggactcctag

SEQ ID NO: 557 - DNA, 972 bp, Mycobacterium Tuberculosis
gtgacacacggaatggtgctcggcaagttcatgccgccccatgcgggacacgtctacctttgcgagttcgcgcggcgatgggtggatgagctgaccatcgtcgtcggatcaacggcagcagagccgattccgggcgcccagcgcgttgcatggatgcgggagctgttccccttcgatcgcgtggtccatctggccaacgagaacccgcagcgcccgtgggagcacccggacttctgggacatctggaaggcgagcctgcagggcgtgctggcaacccgccccgacttcgtcttcggtgccgagccctacaacgcggactttgcccaggtcctcggagcgcgtttcgtggcggtcgatcacggtcgcaccgtcgttcccgtgactgcaaccgacatccgcgcggacccgcttggccactggcaacacatcccacggtgcgtgcggccggccttcgtcaaacgcgtgagcatcatcggacccgaatccaccgggaagaccacgctggcacaggcggttgcggaaaagctccgaacgaagtgggtcccggagcgggcgaaaatgttgcgggagctcaatggcggctcactgataggactggagtgggccgaaatcgttcgcggacagatcgcgtcggaggaagccttggctcgtgacgccgatcgcgtcctgatctgcgacacggatccgctcgcgacgaccgtgtgggccgagttcctggcgggcggctgcccgcaagagctccgtgatctagctcggcgtccctacgatctcacactgctcaccacgcccgatgtgccctgggacgccgacgacggacgctgtgtccccggcgcacgcggtacctttttcgcccgctgcgagcaggctctccgcgccgcgggacgatcattcgtggtgatcacgggcggttgggaagagaggctttcggtgtctttgcgcgctgtcgaagaacttgtgcgtgcccgccgctaa

SEQ ID NO: 558 - DNA, 1134 bp, Mycobacterium Tuberculosis
ttgactggtcgtgctgccacgcccggggtcatccgagagttcgtcgggctgccgtcgcgaaccgcggggcgtgcggctgccggtgggcacccatgccaggggctgtaccaccacagcgtgggacgcaaaccgaaggtggcgctcatcgccgcgcactaccagatcgatttctccgagcactatctcgccgagtacatggcgatccgcggcatcgggtttctgggctggaacacccgattccgtggtttcgaaagcagctttctgctcgatcacgcactggtcgacatcggcgtcggggtgcgctggctccgcgaagttcagggcgtggaaacagtggtgttgcttggcaattcaggtggtggctcattgatggccgcctaccaatcacaagcggtcgatccgaacgtgactcccctggacggtatgcgacccgcagccggggtaaccgaattgccggccgccgacgcatacgttgccgccgcagctcatcccggccgtccggatgtgctcaccgcttggatggacgccgccgtcattgacgaaaatgatccggttgcaaccgatcccgaacttgacctgttcgacgaacgcaacgggccgccgtactcaccggagtttatcagccggtatcgctccgcgcaggtcaaacgcaaccacaccatcaccgactgggccgaatccgaactcaaacgtgttcgcgcagctggcttttctgatcggccgttcagcgtgatgcgtacctgggccgacccgcgcatggtcgatcccagcatcgaaccgaccaagcgtcggcccaaccagtgctacgcgggcacgccggtgaaggcgaaccgctccgcacacggcatcgccgcggcctgcacgctgcgcggctggctgggcatgtggagcctgcgggtggcccaaacccgtgccgcaccccacctggcccggatcacctgcccggccctggtgctcaacgccgaggccgacaccggaatcttcccgtcggatgcccagcagatctacgacgggctcgccagcagcgacaagactcaggtctcgatcgacaccgaccattacttcaccaccccgggcgcccgcagcgagcaggccgacaccatcgccaagtggatagccaagcggtggcgctga

SEQ ID NO: 559 - DNA, 216 bp, Mycobacterium Tuberculosis
gtggacaagacgacggtctacctgccggatgaactcaaggcggccgtgaagcgcgccgctcggcagcgcggagtctccgaagcgcaggtaatccgggagtccatccgggcggcggtcggcggcgccaagccgccgccgcgcgggggtctatatgcgggttcggagcccatcgcgcggcgagtcgacgagctgctggctggcttcggtgagcggtga

SEQ ID NO: 560 - DNA, 303 bp, Mycobacterium Tuberculosis; identical to SEQ ID NO: 444

SEQ ID NO: 561 - DNA, 405 bp, Mycobacterium Tuberculosis
atggaggcgctggcagatgtcggcgtcctggcttcgtggtcaccgctgcacaaacaggtggaagtgatcgactactacccggatggccggccgcaccatgtgagggcaaccgtcaagattctggggctcgtcgacaaagaggtcctcgaatatcactggggcccggactgggtgtgctgggatgccgatcagaccttccagcaacatggacagcacatcgagtacaccgtgaaacctgagggtgtcgatagggcccgggtgcgcttcgacatcaccgtcgagccggcgggaccgatccccggcttcatcgtcaagcgggcaagtgagcatgtgttggatgccgcggcgaaagggctgcagaagttgatcgcgggtgccggcgatcaaggaaacgcgaaatcgtga

SEQ ID NO: 562 - DNA, 1296 bp, Mycobacterium Tuberculosis
gtggccgacaccgacgacaccgcaaccctccgttacccgggaggcgagatcgacctgcagatcgtgcacgccaccgaaggcgccgacggcattgcgctcgggccgctgctggcaaaaaccgggcacaccacgttcgacgtcggcttcgccaacacggccgccgctaaaagctccatcacctacatcgacggagatgccggcattctgcgttatcgcggctacccgatcgaccaactggcggagaagtcaaccttcatcgaggtctgctacctgttgatttacggcgagctgcccgataccgaccagcttgcccagttcaccggccggatccagcgccacaccatgctgcacgaggatctcaagcggttcttcgacggctttccgcgcaatgcccacccgatgccggtgttgtccagcgtggtcaatgcgctgtcggcgtactaccaggatgctctggaccccatggacaacggtcaagtcgagctgtcgaccattcggctgctggccaagctgcccaccatcgccgcgtacgcctacaagaaatcggtcggccagcccttcctctacccagataactcactgacgctggtggagaacttcctacggttgacgttcggatttcccgccgagccctaccaggccgaccccgaggtggtgcgggcgctggacatgttgttcatcttgcacgccgaccacgagcagaactgctcgacgtcgacggttcggctggttggctcgtcgcgagccaacctgttcacctcgatctcgggtggcatcaacgcactatggggtccgcttcatggcggcgccaatcaggctgtcctggagatgctcgagggcattcgcgacagcggcgacgacgtcagcgagtttgtacgcaaggtcaagaaccgcgaggccggggtcaaattgatgggtttcggtcatcgtgtctacaagaactacgatccgcgggcccgcatcgtcaaggaacaggccgacaagatcctggccaagctcggcggcgatgactccttgctgggcatcgccaaggagctcgaagaggcggcgctgaccgacgactacttcatcgaacgcaagctttaccccaacgtcgacttctacaccggcctgatctaccgggccctcggcttcccgaccaggatgttcaccgtgttgtttgccctgggcaggcttcccggctggatcgcgcactggcgtgagatgcacgacgagggcgacagcaagatcggccggccccgccagatctacaccggctacacggagcgcgactacgtcaccatagacgcgcggtag

SEQ ID NO: 563 - DNA, 315 bp, Mycobacterium Tuberculosis
gtgaccggcaagggcatcgttgagtcgacgaccaagacgaagcgggatcgtcacgtaccagtgcctgagcctgtttggcgcaggctccatgccgagttgcccaccgacccgaacgccttggtgttccccggccgtaagggcggattcctgcctctcggtgaataccgctgggcattcgacaacgccggcgaccaggtcgggatcgaaggctggtaccgcacggtctggggcacaccacggcctcgctggcgatcagcgcaggcgctaacgtcaaggtcgtgcaacggctccttggacacgcagcagcggcgatga

SEQ ID NO: 564 - DNA, 915 bp, Mycobacterium Tuberculosis
atggccgtcgctattgcccgtccgaaattggaaggaaacatcgccgtcggcgaggaccgccggatcggcttcgccgagttcggcgccccgcagggtcgtgcggtcttctggctgcatggcaccccaggggcccggcggcagatcccgaccgaagcccgggtctacgccgagcaccacaatattcgtctgattggcgtcgatcggcccggcatcggcgcctcgacgccgcatcagtacgaaaccatcttggcgttcgccgacgatctgcggaccatcgccgacacgctcggcatcgacaagatggccgtggtgggcctgtcgggcgggggcccatacaccctggcgtgcgccgccgggctgcccgaccgggtggtcgccgccggtgtcctcggcggcgtcgcgccgacgcgcggcccggacgcgattagcggcggtttgatgcgccttggttcggcggtggcgccgctgctgcaggtgggcggcaccccgctgcggctgggtgcgagcttgctgatccgggcggcccggcccgtcgcgtcccctgccctcgacctgtatggcctgctctcaccgcgggccgaccggcatttgctggctcggcccgagttcaaggcgatgttcctcgacgatctgctcaacggtagtcgcaagcagctcgctgcgccgttcgccgatgtcatcgcctttgcccgcgactggggattccggctggacgaggtgaaagtccccgtccgctggtggcacggagaccacgaccacatcgtcccgttctcccacggggaacacgtcgtatcccggcttcccgacgcgaagttgttgcacttgcccggcgaaagtcatctcgctgggcttggccgtggtgaagagattttgagcaccctgatgcagatttgggaccgcgacctgcggaaatga

SEQ ID NO: 565 - DNA, 567 bp, Mycobacterium Tuberculosis
atgacaacatcccgcgtgcccctgttgccggtcgacgaggccaaagctgctgccgacgaagcgggcgtgcccgactacatggctgagctcagcatcttccaagtgttgctgaatcatccgcgactagcgcggaccttcaacgacctgctcgccaccatgctgtggcacgggaccctggactcacggttgcgtgagttggtgatcatgcggattggttggctcaccgactgtgactacgaatggacccaacactggcgggttgcttcagggcttggcgtgtcggccgacgatctgctcggtgtacgggattggcaagggtacaacgggttcgggcccgctgagcaggccgtcctggcggccaccgatgacgtggtgcgcgagggcgcggtgagtgcgcagagctggtcggcttgcgagcgggaattacattgcgacaaagtggttctcatcgaactcgttacggtgataagcgcatggcgaatggtcgcttcgatcctgcacagcctcgaggtcccactggaagacggcgtttccagctggccgcccgacggcctttcgccaaggtga

SEQ ID NO: 566 - DNA, 2715 bp, Mycobacterium Tuberculosis
gtggtgactactgccagtgcccccagcgaggatcgagccaagccgacgctgatgttgctggatggcaattcgctggcgtttcgggcgttctacgcactgcccgcggagaacttcaagacccgcggcgggctgaccaccaacgccgtctacggcttcaccgccatgctgatcaacctgctgcgcgatgaagccccgacgcacatcgcggcggctttcgacgtgtcccggcagaccttccgcttgcaacgctacccggagtacaaggccaaccgatcgtcgacccccgacgagttcgctggccagatcgacatcaccaaagaagtgctgggcgcactcggcatcaccgtgctctccgagccggggttcgaggccgacgacctcatcgccacgctggccacccaggccgagaacgagggctaccgggtgctggtggtcaccggggatcgtgacgcactgcaactggtcagtgacgatgtgacggtgctctacccccgcaagggcgtcagcgaacttacgcgcttcacaccggaggccgtcgtcgaaaagtacgggctcacccctaggcagtacccggacttcgccgcgctgcgcggcgaccccagcgataacctgcccggcatacccggggtgggggagaagaccgccgccaaatggatcgccgagtacggctcgctgcggtcactggtggacaacgttgacgccgtgcgcggcaaggtgggcgatgcgctgcgggcgaacctggccagcgtggtgcgcaaccgtgagctcaccgacctggttcgcgacgtgccgctggcccagaccccggacacgctgcggctgcagccctgggatcgcgaccacattcaccggctcttcgacgacctggagtttcgggtgttgcgcgaccggttgttcgacacgttggccgcggccgggggacccgaggtcgacgaggggttcgacgtgcgcggcggcgcgttggcgcccggcacggttaggcaatggttggccgagcacgccggcgacgggcgccgagcgggcctgacggtggtgggtacccatctgccgcacggtggggacgctaccgctatggccgtcgccgccgccgacggcgaaggcgcttacctcgataccgcgacgctgacgcccgacgacgacgccgcgttggcggcctggctagcggatccagctaaacccaaagccttgcatgaggcaaaggcggccgttcatgacctggcgggtcgtggttggaccttggagggcgtcacctccgacaccgcactggcggcctacctggtgcggccggggcagcgcagcttcaccctcgacgacctctcgctgcgctatctgcgtcgcgagctgcgtgcggaaacaccgcagcagcaacaactttcactgctcgatgacgacgatacggacgccgagaccattcaaacgacgatcctgcgggcgcgggcagtcatcgacctggccgacgcgctggacgccgagttagcgcgtatcgactccaccgcgctgctgggggagatggagctgccggtccagcgggtgctggcgaagatggaaagtgccggtatcgccgtcgacctgcccatgttgaccgagctgcaaagccagtttggcgaccagatccgcgacgccgccgaggccgcctacggcgtgatcggcaagcaaatcaacctgggctcacccaagcagctgcaggtcgtgctgttcgacgaactgggcatgccgaagaccaaacgcaccaagaccggctacaccacggatgccgacgcgctgcagtcgttgttcgacaagaccgggcatccgtttctgcaacatctgctcgcccaccgcgacgtcacccggctcaaggtcaccgtcgacgggttgctccaagcggtggccgccgacggccgcatccacaccacgttcaaccagacgatcgccgcgaccggccggctctcctcgaccgaacccaacctgcagaacatcccgatccgcaccgacgcgggccggcggatccgggacgcgttcgtggtcggggacggctacgccgagttgatgacggccgactacagccagatcgagatgcggatcatggcgcacctgtccggggacgagggcctcatcgaggcgttcaacaccggggaggacctgcattcgttcgtcgcgtcccgggcgttcggcgtgcccatcgacgaggtcaccggcgagctgcggcgccgggtcaaggcgatgtcctacgggctggcttacgggttgagcgcctacggcctgtcgcagcagttgaaaatctccaccgaggaagccaacgagcagatggacgcgtatttcgcccgattcggcggggtgcgcgactacctgcgcgccgtagtcgagcgggcccgcaaggacggctacacctcgacggtgctgggccgtcgccgctacctgcccgagctggacagcagcaaccgtcaagtgcgggaggccgccgagcgggcggcgctgaacgcgccgatccagggcagcgcggccgacatcatcaaggtggccatgatccaggtcgacaaggcgctcaacgaggcacagctggcgtcgcgcatgctgctgcaggtccacgacgagctgctgttcgaaatcgcccccggtgaacgcgagcgggtcgaggccctggtgcgcgacaagatgggcggcgcttacccgctcgacgtcccgctggaggtgtcggtgggctacggccgcagctgggacgcggcggcgcactga

SEQ ID NO: 567 - DNA, 3036 bp, Mycobacterium Tuberculosis
atgtcgttcttactcgtggagccggacttggtcacagcagcggccgccaatttagctggtattcgctcggcactgagcgaagccgctgccgccgcatcgacccccacgaccgcgctggcatcggccggcgccgatgaggtgtcggcggctgtctcgcgactattcggcgcctacggtcagcaatttcaagcgctcaacgcccgggcggcgacgtttcacgccgagttcgtgagcttgttgaacggcggcgcggcggcctataccggcgccgaggccgccagcgtgtcgtcgatgcaggccctgctcgacgcggtgaatgcgcccacgcagacgctgctggggcgcccactgatcggcaacggcgccgatggagtggcggggaccgggtcaaatgccggcggcaacggcgggcccggtggaattttgtacggcaacggcggcaacggcggggccggcggtaacggcggggccgccggattgatcggcaacggcggcgccggcggcgccggcggtgctggaggtgcaggcggcgctggcggggccggcggcaccggcggactgttgtatggcaacggcggtgccggcggcaacgggggcagtgccgctgcggccggtggggccggcggcaacgccctgctgttcggcaacggcgggaacggcggaagtggggcttccggcggagccgccggccacgccgggacgatatttggtaacggcggcaatgctggggccggatcggggctagccggcgcggacggcgggttgttcggcaatggcggggacggtggttccagcacctcgaaggctggcggtgcaggtggaaatgcactgttcggcaacggcggggacggcggatcgagcaccgtcgccgccgggggtgcgggcgggaataccctggtcggcaatggcggtgccggcggcgctggcggcaccagcggtctcaccggtagcggcgtggccggcggggccggcggcagcgtcggcctgtggggctccggcggtgccggcggcgacggcggcgccgccacgtcattgttgggcgtcggcatgaacgccggcgctggcggggccggcggcaacgccggcctgctgtacggcaacggcggtgccggtggggccggcggcaatggtggggatacgacggtgccattgttcgactccggcgtcggcggtgccgggggtgctggcggcaacgccagcttgttcggtaacggtgggaccggtggcgtcggcggcaagggggggacgagcagcgatctggccagcgctaccagcggagccggcggggccggcggggccggcggcgtcggcgggctgctctacggcaacggcgggaacgggggggccggtggcatcggcggggctgctatcaacatactcgccaacgccggtgccggcggcgccggtggtgccgcgggcagtagcttcatcggcaatggcggcaacggtggggccggtggcgccggtggggctgcagcgctatttagctccggtgtcggcggtgccggcggcagcggcggcaccgcgttgcttctcggcagcggtggggccggtgggaacggcggcactggtggggctaactctggctccctcttcgcaagtcccggcggtaccggcggtgccggcggtcacggcggtgccggcgggctgatatggggcaacggtggggccggtgggaacggcggcaacggtggcaccaccgccgatggcgcccttgagggtggcaccggcggtatcggcggcaccggaggcagcgccatcgcgttcggtaatggcgggcagggcggcgccggtggtaccggtggggatcacagtggcggcaacggtatcggcggtaagggcggtgccagcggaaacggcggcaacgccggccaagtgttcggcgacggcgggaccggcggaaccggcggcgcgggcggcgccggttccggtaccaaggccggcggcaccggtagcgacggcggtcacggcggcaacgccaccttgatcggcaacggtggtgacggtggcgccggtggcgccggcggcgccggcagcccggccggtgccccgggtaatggcggcaccggtggcaccggcggggtgttgttcggccaaagtggcagctccggtccaccgggcgcggcagcgctggccttccctagcctgagcagcagtgttcccatcctcgggccatacgaagacctcatcgccaacacggtcgccaacctggcgagcatcggcaatacctggcttgccgacccggcgccgttcctgcagcagtacctcgccaaccagttcggctacggccagctgaccctaaccgcgctgacagatgccaccagggacttcgctattgggctggctggcataccgccgagcctgcaatcggccttgcaagccctcgcggcaggcgacgtcagcggcgcggtgaccgacgtgttaggggcggtggtgaaggtcttcgtcagcggtgttgacgcgagtgacttgtcgaacatcctgctgctcgggccggtgggagacctgttccccatcctgagcatccccggcgccatgtcacaaaacttcaccaatgtggtgatgacggtcacggacacaaccatcgccttttcgatcgataccacgaacttgaccggggtgatgacgtttggattgccgctggcgatgacccttaatgcggtgggttcgccgatcacgacggcaatcgcattcgccgagagcacgacagcgttcgtcagcgccgtgcaggccggaaacctgcaggcggcagcggcggccctggtcggtgctcccgccaacgtcgccaacggcttcctcaatggcgaggccaggctgccgctggccctgccaacatcggcgacaggggggattccggtgacggtcgaggttcccgtcggcggcattcttgcgcctctgcagccgtttcaggccacggcggtaataccggtcatcgggccggttaccgttacgctcgaaggtacgcccgccggcggcatcgttcccgcgttggtgaactacgctcccacacagctagcgcaggcaattgccccttag

SEQ ID NO: 568 - DNA, 1059 bp, Mycobacterium Tuberculosis
atggaagcgccaccatatgccggcgatccgacgttcgagcgtttgcggcgctcgtttcagccagccgatctactgccggaactgcaagcggcaggagtgcattacacaatcgctgtcgaggcggcggacgatccggccgagaatgagtctctgttggccactgcgcgccaccatgattggatagcgcgcgtgatcggttgggtcccactcgccgatccggatgaggttaccgagagctcgacgcacgggcggcaccgcccggacgcctcctggcgacgagatctgcggtgccccggcctgctgccgcccgggtgccaccagccagtcttggtcgtaggcttggtaggtcagcagccggaaatgcgaccgatgaatccaccaagtggttttctccggcggacgccgacccgcaggtttcgcgaccgccgcgatgctggtcgcgtattggccgacgaacttgcgtcctatcgcggcagggaccggttgctcgtcctcggccttgcccgcggtggcgtccccgtcggctgggaagtcgcgtcggcgctaggcgccgaattggatgtatttctggttcgcaagctcggcgtgccgcagtggcgcgagctggcgatgggcgcgttggccagtgggggcggggtcgtgatgaacgacgacgtggtttccagcttgcgcatcaccgaccagcaggtgcgtgcggcgatcgacagcgagacggcagagctgcagcggcgcgagctggcgtatcgcggcggacgccctgtcgtcgatccgcgcgccaggatcgtgatcctggttgacgacggcatcgccaccggcgcgagcatgctggcggcggtgcgcaccatccgtgccaccggaccggagtcgatcgtcgtcgcggtcccggtcggtccggccacagcctgccgcgagctcgcggcggaagccgacgacgtggtgtgcgcaaccatgccggcagcgtttgaggccgtcggccaggtctataacgactttcatcaggtcaccgacgacgaggtccgcgagctgctcgcgacgccaaccacaggcgcagcgacctaa

SEQ ID NO: 569 - DNA, 939 bp, Mycobacterium Tuberculosis
atgccgctcagctctcgtatgcccggactcacctgcttcgaaatctttctggccatcgctgaggccggcagtcttggcggcgccgcacgcgaactcgggttgactcaacaagctgtgtcaaggcggctcgcatcgatggaggcccagatcggggtgcgattggccatccggacgacacgtggctcccaactcacgcctgccggcatcgtcgtcgccgaatgggcggcccgcttgctcgaagtcgccgacgagatcgatgccggcctcggctcgctgcgcaccgaaggccgccagcgcatcagagtggtggccagccagacgatagccgaacagctgatgccgcattggatgctgtccttgcgggccgccgacatgcgccgcggtggtactgtccctgaggtaatcctgaccgccaccaatagcgagcatgcgatcgcagccgttcgtgacggcatcgcagatcttggattcatcgaaaacccctgtcctcccacgggattaggcagcgttgtggttgcacgcgacgaactggtcgtcgtcgtgccgccgggtcacaagtgggcccgacggtcacgagtagtgagcgcccgggagctcgctcagacgcctttggtgactcgcgaaccgaactctggcatccgcgattcactcaccgcggcgttacgtgacacgctcggggaggacatgcagcaagcgccaccggtgctggaattatcatcggctgcggccgtgcgggccgcggtcttggccggcgctggaccggctgcgatgagccggctagcgatagccgatgacctggcgttcggtcgattactcgcggtcgacatccccgcgttgaacctgcggcgccagcttcgagccatctgggtcggtgggcgcaccccgccggcgggtgcgatacgagacctgctcagccacatcacttcccgcagcacgtag

SEQ ID NO: 570 - DNA, 549 bp, Mycobacterium Tuberculosis
gtgcgtgagcatcttatgagcatcgaggtagccaacgagtcaggcatcgacgtctcggaagcggaactagtcagtgtcgcacggtttgtcatcgccaagatggacgtcaatccgtgcgccgaattgtcgatgctgctgctggacaccgcggcgatggccgacctacacatgcgctggatggatcttcccgggccgaccgacgtgatgagcttcccgatggacgagctcgagccgggtggtcgccccgacgcccccgaaccgggaccgtccatgctgggcgatatcgtgctgtgcccggaattcgccgctgagcaggcggctgcggccggccacagcctgggccacgaattggccctgctgaccatccacggtgtgcttcacctgctcggctatgaccacgccgagccagacgaggaaaaagagatgttcgccctgcaggaccggttgcttgaagagtgggtagccgaccaggttgaggcctaccagcacgaccggcaggacgagaaggaccgccggttgctcgacaagtcaaggtattttgacctttga

SEQ ID NO: 571 - DNA, 1641 bp, Mycobacterium Tuberculosis
atggaccaacaccagcgaccggatccaatgggccccggctctcctcgcgccagcgctcgtcgaccggagccagatccgatgggcgagccgtggtggtcgcgagccgtgttctaccaggtctatccccgatcgttcgccgacagcaacggcgacggggtgggcgacctggacgggttggcgagccggcttgaccacctgcaacagctcggtgtcgacgcgatctggatcaacccggtcaccgtctcgccgatggcagaccacggatacgacgtcgccgatccccgcgacatcgacccactcttcggcgggatgccggcgttcgaacggttggtcgctgcggcacaccggcagggcatcaaagtcaccatggacgtggtgcccaaccacaccagttcggcgcacccatggtttcaggccgcgctggctgacctcccgggtagcccggcgcgggatcgctatttctttcgcgacgggcggggccccgacgggtcgctgccgccgaacaactgggagtcggtgttcggcgggccggcctggacccgagtgcgcgaaccggacggcaacccgggccagtggtacctgcaccttttcgacaccgaacagccggacctgaactgggacaacccggaaatccttgacgacttcgagaaaacactgcgcttctggctggaccgcggcgtggatggcttccgcatcgacgtggcgcacggcatggccaagcccccgggcctgccggactcaccggacctgggcatcgaggtgctgcaccaccgcgatgacgacccgcgcttcaaccacccgaatgtgcacgcgattcaccgcgacatccgcacggtgatcgacgagtaccccggagcggtaaccgtcggcgaggtgtgggtacacgacaacgcccgctgggcggagtatctgcggcccgacgaactgcatctcggcttcaatttccggctggcgcgaaccgagttcgacgccgccgagatccgcgacgcggtggcgaactccctggccgccgcggcgctgcagaacgcgaccccaacctggacgctggccaatcacgatgtgggacgggaggttagccgctacggcggcggcgagatcgggctgcgccgggccaaggcgatggcggtggtgatgctcgccctgccgggcgtggtcttcctctacaacggccaggaactgggtttgcccgacgtggacctgcccgacgaggtgctgcaggatccgacgtgggaacgctcgggacgcaccgaacgcggtcgcgatggctgccgggtgccgattccctggtcgggcaacattcccccgttcgggttctcgacgtgtccagacacctggttgccgatgccgccggaatgggcggcgctgaccgccgaaaaacaacgcgctgatgccggctcgaccttgtcgttttttcgacttgcactcagattacgtagggaacgaaatgaattcgacggcgacgtcgactggctggccgcgcccgacgatgcgctgatattccggcgtcacggcgggggtttggtgtgcgcgctcaacgccgctgagcgtccgctggcgctgccggcaggtgaacccatcctggccagcgcaccgttgaccgacgccacgttgccacccaatgccgcggcctggctggtgtag

SEQ ID NO: 572 - DNA, 531 bp, Mycobacterium Tuberculosis
atggcacccaaagcggttctcgtcggcctgccgggctccggcaagtccaccatcgggcgccggctggccaaggcgctcggggtcggcctgctcgacaccgacgtcgcgatcgagcagcggaccggacgcagcatcgccgacatcttcgccaccgacggggagcaggagttccgacgtatcgaggaggacgtggtgcgcgcggcactggccgaccacgacggtgtgctgtcgctcggcggcggcgcggtgaccagccccggtgtgcgcgcggcgctggccggccacaccgtcgtctacctggagatcagcgccgccgagggcgtgcgccgcaccggcggcaacaccgtgcgcccactgctggccggccccgaccgcgccgaaaaataccgcgcgctgatggccaagcgggcaccgctgtaccggcgcgtcgcgaccatgcgagtggacaccaatcgccgcaaccccggggcggtggtccgccatatcctgtcgcggctgcaggttcccagccccagcgaggcggccacatga

SEQ ID NO: 573 - DNA, 927 bp, Mycobacterium Tuberculosis
gtggatttgagcgcctctaggtccgatggtggcgacccgctgcgcccggcttcgccgcgcttgcgatcgcctgtgtccgatggtggcgacccgctgcgcccggcttcgccgcgcttgcgatcgcctgtgtccgatggtggcgacccgctgcgcccggcttcgccgcgcttgcgatcgccactgggcgcgagtcgcccggtggttggcctgacggcttatctggagcaggtgcgcaccggggtttgggatattcctgcgggttatctgcccgccgattacttcgaaggcatcaccatggccgggggtgttgcggtactgctgccgccgcagccggtcgaccccgagagcgtcggctgcgtgctggacagcctgcacgctctggtgatcaccgggggctacgacctggacccggcagcttatggccaggagccgcatccggccaccgatcaccctcgcccgggccgcgacgcttgggagttcgcgctattgcggggcgcgcttcagcgggggatgcccgtgttgggcatctgtcgcggcacccaggtgctcaacgtcgcgctcggcggcacgctgcaccagcacctgcccgacatccttggccatagcgggcatcgggcgggcaacggggtcttcaccaggttgccggtccacaccgcatcgggcacccggttggccgagctgatcggcgaatccgccgacgtgccgtgctaccaccaccaagccatcgaccaggtcggtgagggcctggtggtcagtgcggtggatgtcgacggggtaatcgaggcgctggagctacctggggacacgttcgtactagcggtgcagtggcatccggagaagtcgttggacgatctgcggctgtttaaggcgttggtggacgccgccagcggatacgcgggccggcagagccaagcggagccacgatga

SEQ ID NO: 574 - DNA, 6336 bp, Mycobacterium Tuberculosis
atggaatcacgtgtcactcccgttgcggtgatcgggatgggatgtcggcttcctggggggatcaactcgcccgacaaactgtgggagtcgttgctgcgcggtgatgacttggtcaccgagattccgcccgaccgctgggacgccgacgactattacgaccctgagccaggggttcccgggcggtcggtgtcccggtggggtgggttccttgacgacgtcgccggtttcgatgctgagttcttcgggattagcgagcgggaagcgacctcgatcgatccgcagcagcggctactgctggaaacgtcgtgggaggcgatcgagcatgctggtctggatccggcgtcgttggccgggtcctcgacggccgtttttactgggctgacccacgaggactacctggtactcaccacaacggcgggcggtttggccagtccatatgtggttaccggcctcaacaacagtgtggcgtcagggcggatcgcgcacacattgggtctacatggtccggcgatgacgtttgacaccgcgtgttcttcgggtctgatggcggtgcacctggcctgccgcagcctgcatgacggcgaagctgacctcgctttggcgggcggttgtgcggtgctgctggagccgcatgccagtgtggcggcgtctgcgcagggcatgctgtcgtcaaccggtcggtgccattcattcgatgctgacgcggatgggtttgtgcgttccgagggctgcgcgatggtgttgctgaagcgactgccggatgcgctgcgcgacggtaatcggatcttcgccgtggtgcgtggcacggccaccaatcaggacggccgcacggagacgctcaccatgccgtccgaggacgcccaggttgccgtgtaccgtgcggcgttggcggcggcgggcgtgcagcccgaaacggtcggtgtggtcgaggcgcacggcaccggtacgccaatcggcgacccgattgagtaccgcagcctggcgcgggtgtatggcgcgggcaccccctgcgcgcttggatcggccaagagcaacatggggcacagcacggcatcggcggggaccgtcgggctgatcaaggcaattctgtcactgcggcacggggtggtgccgccgctgctgcatttcaatcggctgcccgatgagctttccgacgtcgagaccgggctctttgtgccgcaagcggttacgccgtggcccaacggtaatgatcacacaccgaagcgggtcgcggtgtcctcgttcgggatgtccgggaccaacgtgcatgccatcgtggaagaggccccagcagaagcttccgcacccgagagttcaccgggcgacgctgaggtgggcccgcggctattcatgctgtcgtccacgtccagcgacgcactgcgccagacggcccgccaactagccacctgggtggaagaacaccaggactgcgtggcggcctcggatctggcctacacgctggcgcgtggccgcgcgcaccggccggtgcgcaccgcggtggttgccgccaacctgccggagctcgtcgagggtttgcgcgaggtggccgacggtgacgccctctatgacgcggcggtgggacacggtgatcgaggaccggtctgggtcttctccgggcaagggtcgcagtgggcggcgatgggcacgcaattgctcgccagcgaaccagtgttcgcggccaccatcgccaagctggagccggtgatcgccgcagaatcgggattctcggtgaccgaggcgataacggcgcagcagaccgtgaccggaatcgacaaagtgcagccggcagtgttcgccgttcaggtcgcgttggccgccaccatggagcaaacctacggagtgcggccgggcgcggtcgtcggacactcgatgggtgagtcggccgcggccgtcgtcgcgggggcactgtcgctcgaggacgcggcgcgcgtcatttgccgccgctcgaagctgatgacccgcatagccggtgctggtgccatgggctcggtggaattgcccgccaagcaagtgaattcggagctgatggcacgcggaatcgacgatgttgtggtctcggtggtggcgtccccgcaatccacggtgatcggcggtacgagcgacaccgttcgtgacctcatcgcccgttgggagcagcgggacgtgatggcgcgcgaggtggccgtcgacgtggcgtcgcactcgcctcaagtcgatccgatactcgacgatttggccgcggcgctggcggacattgctccgatgacgcccaaggtgccgtactactcggcgaccctgttcgacccgcgcgagcagccggtgtgcgatggcgcttactgggtggacaatctgcgcaacacggtgcagttcgccgcggcggtgcaggctgcgatggaggacggctaccgggtcttcgcggagctgtcgccccacccgctgcttacccacgccgtcgaacagacgggccgaagcctcgacatgtcggtcgccgccctggccggcatgcggcgagagcagcctctgccgcatggtctgcgcggcttgctgacggagctgcaccgcgcgggcgccgctttggactattcggcgctgtatcccgctgggcggctggtggatgcgccgctgccggcgtggacccacgcccgcctattcatcgacgatgatgggcaagaacagcgggcacaaggtgcctgcaccatcaccgtgcatccgttgcttggctcgcatgtgcggctgactgaggaacctgagcgccacgtctggcagggcgacgttggcacctcggtgctgtcctggctcagcgatcatcaggtgcataacgttgccgcccttcccggcgccgcctactgcgagatggctttggctgcggccgctgaggtcttcggcgaagcggctgaggttcgcgacatcacctttgagcagatgttgttgctcgacgagcagaccccgatcgacgccgtcgcatcgatcgacgcgcctggtgtcgtcaacttcaccgtggagaccaaccgggacggtgaaaccacccggcatgccaccgcggcgctgcgcgccgccgaagatgactgcccgccgccggggtacgacatcaccgctctgctgcaggcgcatccgcacgccgtgaacgggaccgccatgcgggaatcgttcgccgagcgtggtgttactttgggcgccgcgttcggtggtctgaccaccgcgcataccgccgaggcgggagccgcgacggtgctggccgaggtcgcgctgcccgcgtcgatccggttccagcagggcgcctaccgaatccacccggcgctgctggacgcttgtttccagtcggtcggcgcgggcgtccaggccggtacggccactggtggcctgctgttgccgttgggtgtgcgcagcctgcgtgcctacgggcctacccgcaatgcccgctactgctacacgcggttgaccaaggccttcaacgacgggacccgaggtggtgaggccgacctcgacgtgctggacgagcacgggaccgtcctgttggccgtgcgtgggctacgcatgggaaccgggacctccgaacgcgacgagcgtgaccgcctagtcagcgagcggctactgaccctcggatggcagcagcgagcgctgcccgaggttggcgacggcgaggctggatcgtggctattgatcgacacttccaacgccgtcgacacccccgacatgttggcttccacgttgacggacgcgctgaagtcccacggcccccaaggcaccgaatgcgccagcctgtcctggtcggtccaggacaccccgcccaacgatcaagctggcctcgaaaagctgggcagccagctgcgtggccgcgatggtgtggtgatcgtgtatgggcctcgcgtcggcgaccccgatgagcacagtctgctggccggtcgtgaacaggtccgtcacctggttcggatcacccgggaactggctgaattcgagggcgagctgccgcgcttgttcgtggtgaccagacaagcccagatagtgaagccgcacgactcgggagaaagagccaacctggagcaggccggcctgcgtggtctgctacgggtgatcagcagtgaacatccgatgctgcgcaccaccttgatcgatgtggacgaacacacggacgttgagcgggtggcccagcagctgctgagcggatcggaagaggacgagacggcctggcggaatggcgactggtatgtggcccgcttgacccccagtccgctgggccatgaagagcggcgcaccgcggtcttggatcccgaccacgacggtatgcgggtgcaggtccgcaggccgggagacttgcaaacgttggaattcgttgcgagtgaccgagttccgcccggccccgggcaaatcgaagtcgcggtcagcatgtccagcatcaacttcgccgacgttttgatcgcgtttggacgattccccattatcgatgaccgcgagccgcagttgggtatggatttcgtcggtgtggtgactgcggtcggggaaggtgtcaccggtcaccaggtcggtgatcgtgttggcggtttctccgaaggtggctgttggcggacgttcctcacctgtgacgccaacctcgcggtcacgctgccgcccggcttgaccgatgagcaggcgatcacggcggccaccgcgcatgccaccgcctggtatgggctcaacgacctggctcagatcaaggccggtgacaaagtgttgattcactccgccaccggcggtgtggggcaggcggccatatcgattgcccgcgccaagggagcggagattttcgcgaccgccggcaatcccgcgaagcgagccatgctgcgcgacatgggcgtcgagcatgtctacgattcgcgcagcgtcgagttcgccgagcagatccggcgcgacaccgacgggtacggcgtggatatcgtgctgaactcgctgaccggcgccgcccaacgtgcggggctggagttgttggccttcggcggacgcttcgtcgaaatcggcaaggccgacgtttacggcaacacccggctggggctgttcccgttccgtcgcggactgaccttctactacttggacctcgcgctgatgtcggtcacccagcccgaccgggtccgtgagttgctggccacggtgttcaagctcaccgcagacggggtgctgaccgcaccgcaatgcactcattacccgttggccgaggcggccgacgccatccgggcaatgagcaacgccgagcacaccggcaaactcgtgctcgacgtaccgcgtagcggccgtagaagcgtggcggtcaccccggagcaagctccgctgtaccgccgcgacggctcctacatcatcaccggcggcctgggtggcctcggcctgttcttcgcctcgaagctggccgcggcgggctgtggccggatcgtgctgaccgcacgttcccagcccaaccccaaagcgcggcagaccatcgaaggcctgcgcgcggctggggccgacatcgtggtggagtgtggcaacatcgccgaacccgacacggcggaccggctggtgagtgcggcgaccgctaccgggcttccgctgcgcggtgtgctgcactcggcggcggtggtcgaggatgccacgctgaccaacatcaccgatgagctcatcgatcgcgactggtcgcccaaggtgttcggatcctggaacctacaccgcgccaccctcggtcagccgctggactggttctgcttgttctcctcgggagcggcattgctcggctcgccgggtcagggcgcctacgcggcggccaacagctgggtcgacgtcttcgcgcactggcgccgcgcccagggcctgccggtcagcgcgattgcgtggggtgcgtggggcgaggtcggccgcgccacgttcttggccgaggggggcgaaatcatgatcaccccggaggaaggtgcgtatgccttcgagacgctcgtgcgccacgaccgcgcctacagcggttacattccgatcctcggggcgccatggctggccgaccttgtccgacgcagcccgtggggtgaaatgttcgcatccactgggcagcggtcaaggggcccaagcaaattccgcatggagctcctttcgctgccgcaagatgaatgggccggccggctacggcgtctgctggttgagcaggccagtgtgatcctgcgtcgcacgatcgacgctgaccgctcattcatcgagtacggcctggattcgctgggcatgctcgagatgcgtacccacgttgaaaccgagaccgggatacgcctgacccccaaggtcatcgccacaaacaacaccgcccgcgctttggcccagtacttggcggacacgctggccgaggagcaggcggcggcaccggcggcatcatag

SEQ ID NO: 575 - DNA, 585 bp, Mycobacterium Tuberculosis
atgaacctggcgacgtgggcggagcgcaacggtgttgctccggggaccgcctaccgctggtttcgtgctggtctgttgtcggtgatggcgaggcgagtgggccgactgattctcgtcgacgaaccggctggggacgctggcatgcgatcaccgaccgcggtgtatgcacgggtgtcgtcggccgatcagaaagccgatctggatcggcaggtcgcgcgggtgaccgcgtgggccacggcccaacagatgccagtcgacaaggtcgtgaccgaggtcggttccgcgttcaacgagcaccgccgtaagttcctttcactgctgcgcgacccgtcagtccaccggatcgtggtggagcaccgggatcggttctgccggttgggctcgaagtacgtgcaggcagcgtttgcggcgcagggccgcgaactggtggtagtcgactctgccgaggtcgatgacgacctggtgcgggatatgaccgagatcctgacgtcgatgtgcgcccgtctgtatggcaaacgggctgccgagaatcgaaccaagcgcgcattggcggccgctgctggcgaggaccatgaggccgcctga

SEQ ID NO: 576 - DNA, 279 bp, Mycobacterium Tuberculosis
gtgtcggtactgacagtccccagacagacccccagacaaagattgccggttttgccgtgccacgtcggtgatcccgatctgtggttcgccgataccccggccggtctcgaggtagccaagacactgtgtgtgagctgcccgatcaggcggcagtgcttggccgcggcgcttcagcgggctgaaccctggggcgtttggggtggtgagatattcgaccaaggctcgatcgtgagtcacaagcgtccgcgcggacgtccgcgcaaggatgctgttgcatag

SEQ ID NO: 577 - DNA, 792 bp, Mycobacterium Tuberculosis
atgagcgtcgagccggacgtcgaaactttggatccgcccctaccgccggtaccggacggcgcggtgatggtgaccgtcaagatcgcccggttcaaccccgacgaccccgacgcgttcgcggccaccggcggctggcagagcttccgggtgccctgtttgcccagcgatcggctgctcaacctgctcatctacatcaagggctacctcgacggcacgctcaccttccggcgatcctgcgcccatggggtgtgcggctctgatgccatgcgcatcaacggggtgaaccggctggcctgcaaggtgctgatgcgtgacctgctgccgaagaagaagggcaaatcgttgaccgtcacggtcgagccgatccgcgggctgccggtggaaaaggacctggtggtcgacatggagccgttcttcgacgcctaccgggcgatcaaaccgtacctgatcaccagcggcaacccgcccacccgcgaacggatccagagcccgaccgaccgcgcccgctacgacgacaccaccaagtgcatcctgtgcgcgtgctgcaccaccagctgcccggtgttctggcacgagggcagctacttcggcccggcggcgatcgtcaacgcgcaccgcttcatcttcgacagccgcgacgaggccgccgccgagcgcctcgacatcctcaacgaggtcgacggggtgtggcgctgccgcaccacgttcaactgcaccgaatcctgcccacggggcattgaggtgaccaaggcgatccaggaggtcaagcgcgcgctgatgttcacccgctga

SEQ ID NO: 578 - DNA, 987 bp, Mycobacterium Tuberculosis
aaagaccgcgtcggctttcttcgcggccgagctcgaccggccagcacgctaattacccggttcatcgccgatcatcagggccaccgcgagggccccgatggtttgcggtggggtgtcgagtcgatctgcacacagctgaccgagctgggtgtgccgatcgccccatcgacctactacgaccacatcaaccgggagcccagccgccgcgagctgcgcgatggcgaactcaaggagcacatcagccgcgtccacgccgccaactacggtgtttacggtgcccgcaaagtgtggctaaccctgaaccgtgagggcatcgaggtggccagatgcaccgtcgaacggctgatgaccaaactcggcctgtccgggaccacccgcggcaaagcccgcaggaccacgatcgctgatccggccacagcccgtcccgccgatctcgtccagcgccgcttcggaccaccagcacctaaccggctgtgggtagcagacctcacctatgtgtcgacctgggcagggttcgcctacgtggcctttgtcaccgacgcctacgctcgcaggatcctgggctggcgggtcgcttccacgatggccacctccatggtcctcgacgcgatcgagcaagccatctggacccgccaacaagaaggcgtactcgacctgaaagacgttatccaccatacggataggggatctcagtacacatcgatccggttcagcgagcggctcgccgaggcaggcatccaaccgtcggtcggagcggtcggaagctcctatgacaatgcactagccgagacgatcaacggcctatacaagaccgagctgatcaaacccggcaagccctggcggtccatcgaggatgtcgagttggccaccgcgcgctgggtcgactggttcaaccatcgccgcctctaccagtactgcggcgacgtcccgccggtcgaactcgaggctgcctactacgctcaacgccagagaccagccgccggctga

SEQ ID NO: 579 - DNA, 435 bp, Mycobacterium Tuberculosis
atgtgggcaggctaccgttgggccatgagcgtcgaactgacacaagaggtttctgccaggctcacgtccgacctttacgggtggttgaccaccgtcgcccgatcggggcagccggttccgcggctggtgtggttctacttcgacgggaccgacctgacggtgtactccatgcctcaggcggccaaggtcgcccacatcaccgcccatccgcaggtcagcctgaacctggactccgacggcaacggcgccgggatcatcgtggtgggcgggacggcggcggtggtggccaccgatgtcgactgccgcgacgacgcgccgtattgggccaagtaccgcgaggatgccgcgaagttcgggctgaccgaggcgatcgccgcctacagcacccggctgaagatcaccccgacccgggtgtggacgacgcccacgggctga

SEQ ID NO: 580 - DNA, 297 bp, Mycobacterium Tuberculosis
gtgtctttcactgcgcaaccggagatgttggcggccgcggctggcgaacttcgttccctgggggcaacgctgaaggctagcaatgccgccgcagccgtgccgacgactggggtggtgcccccggctgccgacgaggtgtcgctgctgcttgccacacaattccgtacgcatgcggcgacgtatcagacggccagcgccaaggccgcggtgatccatgagcagtttgtgaccacgctggccaccagcgctagttcatatgcggacaccgaggccgccaacgctgtggtcaccggctag

SEQ ID NO: 581 - DNA, 1155 bp, Mycobacterium Tuberculosis
atgaaccgaatctggttgcgcgccatcatattgacggccagcagcgcgctgcttgccggctgtcagtttggcgggctgaactcgctgccgctgcctggcaccgccgggcacggtgaaggtgcctactcggtcaccgtcgaaatggctgatgtggcgacgttgccgcagaactcaccggtcatggtcgatgacgtcaccgtcggcagcgtggccggcattgtcgcggtccaacgacccgacggatccttttatgccgccgtgaagctggacctggacaagaatgtgttgctgccggccaacgccgtggcgaaggtctcccagacctcgctgctgggttcgttacatgtagagctggcgccaccgacggaccgcccgccgaccgggaggttggttgacggctcgagaatcaccgaggccaacaccgaccgattccccaccaccgaggaggttttctcggcgctgggggtggtggtcaacaagggtaacgtcggtgcgttggaagagatcattgacgagacccaccaggcggtggcgggtcggcaggcccagttcgtcaacctggtccccaggctcgcggagttgacggcgggcctgaaccggcaggttcacgacatcatcgatgcgttggatgggctgaaccgagtctccgcgatcctggcacgtgacaaggacaacctgggccgagcactggacacgctgcccgacgcggttcgcgtgctcaaccagaaccgggaccacatcgtcgacgcgttcgccgcgctcaaaaggttgacgatggtcacgtcgcacgtgctggccgagaccaaggtggatttcggtgaagacctcaaagacctctactcgatcgtcaaggccctcaacgacgaccgaaaggatttcgtcacctcgctgcagctgttgctgacgttcccatttcccaacttcggtatcaagcaggcggtgcgcggcgactatcttaacgtgttcaccaccttcgacctcaccctgcgccggattggtgagacgttcttcaccacggcgtacttcgacccgaacatggcgcacatggacgagatcctcaacccgcccgacttcctgattggcgaactggccaacctgtccgggcaagcggccgacccatttaagattccacccggtacggcgtcgggacagtag

SEQ ID NO: 582 - DNA, 948 bp, Mycobacterium Tuberculosis
atgaggatgctgcgacgcctacgtcgcgcaactgtcgctgcggctgtgtggctcgcgacggtgtgcctggttgcgtcctgcgccaatgctgatccgctcgggtcagcgaccggcagtgtgaagtccatcgtcgtcgggtccggtgattttccggaatcgcaggtgatcgccgaaatctacgcacaagtgttgcaggccaacggtttcgacgtggggcggcggttgggaattggcagtcgagagacgtatatcctggcgctcaaagatcattccatcgacctggtgccggagtatatcggcaacttgctgctgtactttcaacccgacgccacggtgaccatgctcgatgccgttgagttggagctctacaagcgacttcccggcgatctgtcgatcctgacgccgtcgccggcctctgacactgacaccgtcaccgtcaccgccgctaccgccgcccggtggaacctgaaaacgatcgccgacctggccccgcattccgcggatgtgaagttcgcggcgccgtcggcctttcagacccggccgtccgggttgcccgggctgcggcacaaatactcactcgacatcgcgccgggcaacttcgtgaccatcaacgacggcggcggtgcggtgaccgtgcgagcactggtggagggaacggccacagccgccaacctcttcagcacctctgcggctatcccgcaaaaccacctggtggtgctggaagatcccgaacataacttcctagccggaaacattgtgccgcttgtgaattcgcgaaagaagtcggatcacctcaaagatgtgctggacgcggtgtcggcaaagctgaccactgccggcctggccgagctcaatgcagcggtgtccggcaactccggggtggaccccgaccaggccgcgcggaaatgggtgcgggacaacggtttcgatcatccagtgcggcagtag

SEQ ID NO: 583 - DNA, 1881 bp, Mycobacterium Tuberculosis
gtgccgatggaacacaaacctcccactgccgtcatccaggcggcacacggtgaacactcgttaccgttgcatgacacaacggatttcgacgacgccgatcgcggattcattgccgcgctgtccccgtgtgtgatcaaggctgccgatggtcgcgtggtgtgggacaacgacgcgtactcgtttctcgacggtgccgcgccgacatcggtgcatcccagcctgtggcggcaatcccagctgaccgcgaaacagggcctctaccaggtggtgccgggcatctatcaggtccgcggattcgatatctccaatatcagcttcgttgagggtgacactgggctgatcgtcatcgacccgttggtgtccaccgaggtggccgccgccgcgctggacttgtatcgcgcccaccgcggagccgaccgccccgtggtcgcggtcatctacacccacagccatgtcgatcatttcggtggggtgctcggcgtcaccacccaggccgacgtggacgcgggaaaggtggcggtgctggcgccggaggggttcaccgcgcacgccgtgcaggaaaacatctacgccggctcggcgatgatgcgccgtgcgggctacatgtacggcaccgtgttggcgcgcggtctccgggggcacgtcggctgcggcctcgggcagacactgtcgaccggtgaggtttcgctcgtcgtgccgacggtcgacatcaccgagaccggggagacccacaccatcgacggggtggagatcgagttccagatggccccgggcaccgaggcccctgcggagatgcacttctatttcccgcgcttccgcgcgttgtgcatggccgaaaacgccacgcataacctgcacaacctgctgaccctgcgcggcgccttggtgcgcgatccgcgcgcctggtcgggctatctcaccgaggcgattgacacctttgccgaccgaaccgacgtggtgttcgcctcgcaccactggccgacgtggggacgcgagaagatcgtcgagttcttgtcgcaacagcgcgacatgtattcatatctgcacgatcagacgctgcggctgctgaaccagggctacaccggtgtggagatcgccgagatgttccagctgccaccggcgctgcagcgggcatggcacacccacggctactacgggtcggtcagccataacgtgaaggcgatctatcagcgttacatgggctggtttgacggtaacccgggctggttgtggccgcatccgcccgaggcgctggcgccgcgttatgtcgacgcgttgggtggcatcgaccgagtgctggagctggcccgcgaagccttcgacgcaggtgatttccgttgggcggcaacgcttctcgaccatgcggtgttcgccgacagcgagcacgctgcggcccgcgggctctatgccgacaccctggagcagctggcctacggcgcggagtgtgcgacctggcgcaatttctttctgaccggggccgccgagctgcgcgacgggaacccgggcagctccgggcaagtcccggcgcccacgtttttcgcccagctgacgccggaccaaatctttgacgtcctggcgatcagcatcaatggcccacgcgcatgggacctcgacctggccatcgatttcaccttcaccgagccggatgtcaactatcggctcacgctgcgcaacggcgtgttgatacatcgcaagcttcccgccgatccggcgacggcgaacgcgacggtgacggtgggcgacaaggttcggttggtcgccgcggcgctgggcgatatcagctcacccggtttcgaggtgttcggcgaccggacggtgctgcagacattcttgagcgtcctcgaccggcccgattcggccttcaacatcgtgacgccgtag

SEQ ID NO: 584 - DNA, 1248 bp, Mycobacterium Tuberculosis
atgcgcgctggcgacggcaagatccgtgtcccggccgacctagacgccgtcacggcaaccggcgaagaggaccactccgaaatcgacggtgcggccgtcgaccggatctggcgggccgcacgccattggtatcgggccggtatgcatcccgcgatccagttgtgcattcggcaccatgggcgggtcgtgctcaaccgcgcgatcgggcacggctggggcaacgcccccaccgatgaggccgatgccgagaagatcccggtgacgactgacaccccgttctgcgtgtactcggcggccaaggcgatcacggcgaccgttgtacacatgctcgtcgagcgcggacacttcgcgctcgacgaccgcgtctgcgagtacctgccctcctacaccagtcatggcaagcaccgcaccacgatccggcacgtgctgacccacagcgcaggcgtcccgtttcccaccgggccccgacccgacgtcagacgcgcggacgaccatgaatacgcggtggaaaggctcggcgaactacggccgctatatcggcccggactggtacacatctaccacgcgctgacctggggtccgttgatgcgtgagatcgtctacgcggccaccggcaaggaaatccgcgagatcctggccaccgagatcctcgacccgctgggctttcggtggaccaacttcggcgtcgccgagcgcgatgtgccgctggtcgcgcccagtcacgccaccgggcggcagctgccgccggtgatcgccgcggtgttccgcaaggcgatcggcggaaccgtgcacgagatcatcccctatacgaacaccccgttcttcctcagcaccatcctcccgtcgtccaacactgtgtcaacggccaacgagctgtcccgctttatggaaatcctgcgccgcggtggcgaactcgacggtgttcgtgtactgagtcccgagacgctgcgcggcgcggtgacggaatgccggcgcttgcgaccggacttcgccaccgggctgatgccgcttcgctggggcaccgggttcatgctggggtccgccaagtacgggccgttcgggcgcaacgcgccggcggcattcggccatctcggtctggtcaacattgcggtttgggccgaccccgaacgagctctgtcgggcggtttgatcagtagcggcaaacccggtagggaccccgaggctgggcgctacggcgccctgctgaacgccattaccgccgaaataccacgggcatcgtcgggctga

SEQ ID NO: 585 - DNA, 486 bp, Mycobacterium Tuberculosis
gtgagcgagaaagtcgagtcaaaggggctagcggatgcggcacgcgatcacctcgcggctgagttggcccggctgcggcagcgacgcgatcggctggaggtcgaggtcaagaacgaccggggcatgatcggcgatcacggcgacgcggccgaggcgatacaacgtgccgacgaactggccatcctcggtgaccggatcaatgaactggaccggcggctgcgcaccgggcccaccccctggagcgggtcggaaacgctgcccggcggcaccgaggtgaccttgcggttccctgacggtgaagtcgtcacgatgcatgtaatctccgtcgtcgaagagacgccggtgggccgagaagccgaaaccctgacggcgcgcagcccactaggtcaggccctggccggtcaccaacccggcgacacggtgacctactcgaccccgcagggtcctaatcaggtccagctgcttgctgtcaagctgccctcataa

SEQ ID NO: 586 - DNA, 6381 bp, Mycobacterium Tuberculosis
ttgggcttggggtcggcggcgtcaggcactggtgcagataggggtgcatggacgttggctgaaccacgtgtgactccggttgctgttatcggcatggcttgccggctgcccggcgggatcgattcccccgagttgttgtggaaggcgttgttacgaggcgacgacctgatcaccgaggtgccgccggaccggtgggattgcgacgagttctacgacccgcagccgggcgtgcccggtcggacggtgtgcaagtggggcggtttcctggataaccccgcggatttcgattgcgagttctttggcatcggcgagcgggaggcgattgcgatcgatccgcagcaacgtctgttgctggagacgtcctgggaggccatggagcacgccggtcttactcagcaaacgctggcaggctcggcgaccggcgtgttcgcgggtgtcacccatggtgactacacgatggtggcggccgacgccaaacaattggaggagccgtacggatatctgggcaacagcttcagcatggcgtcgggccgggtcgcctacgcgatgcgactgcacggtccggcaataaccgttgataccgcatgctcgtccggcctgacggccgtgcacatggcgtgtcgcagcctgcacgagggtgaaagcgacgttgccttggcggggggtgtcgccttgatgctggagccacgcaaggccgctgctggatccgctttgggcatgttgtccccgaccggacgttgtcgcgcgttcgatgtcgcggctgacgggttcgtgtcaggcgagggttgtgccgtggtggtgctcaagcggttgccggatgcattggccgacggtgaccggatcctggcggtaattcgtggcacgtccgcaaatcaggatggccacacggtcaatatcgcgacgccttcgcagcccgcacaggttgcggcttatcgagcggcgttggctgccggtggcgtggacgccgcgacggtcggcatggtcgaagcgcacggccccggcaccccgatcggtgaccccattgaatatgcaagtgtctccgaggtgtatggggtcgacggcccgtgcgcactcgcatcggtgaagaccaacttcggacacacccagtcgaccgccggggtgctagggctaatcaaggtggttctcgctctgaaacatggtgtggttccacgtaatctgcacttcactcggctgcccgatgagattgctggcatcaccaccaacctcttcgtgcccgaggtgaccacaccgtggcccaccaacggtcgtcaggtgccccggcgggcggcagtgtcgtcttatgggttctcgggaacgaacgtgcacgctgttgtggagcaagctccgcaaaccgaagcccagccccacgcggcgagcacccccccgaccggcacccctgccttgttcacgctgtccgcttcctcggccgacgcgctgcggcagactgctcagcggttgaccgactggatacagcagcacgccgactccctggtgctctcggatcttgcgtacacgctggcgcggcggcgtacgcaccggtcggtgcgcacggcggtcatcgcgagcagcgtcgacgagctgattgccggcttgggcgaggtcgccgacggtgacaccgtttaccagcccgcggtggggcaggatgaccgcgggccggtctggttattctccgggcaagggtcgcagtgggcagcgatgggcgccgatctgctgacgaacgaatcggtgttcgccgcgaccgttgcggagctagagccattgatcgccgcggagtccgggttctcggtcaccgaggcgatgacggcgcccgagaccgtgactggcatcgacagagttcagccgaccatcttcgcgatgcaggtcgcgttggcagccacgatggcggcatacggagtgcgcccgggcgccgtgatcggccactcaatgggtgagtcggccgcggctgtggtcgcaggagtgctgtcagccgaagatggggtacgcgtcatctgccgacgatcaaaactgatggcgacgatcgccggttccgcggcgatggcgtcggtggagttgcctgccttagctgtgcagtcggaattgaccgctctaggcatcgacgatgtggtggtcgccgtggtgaccgcgccgcagtccaccgtgatcgccggaggcaccgagtcggtgcgcaagctggtcgacatatgggagcggcgagacgtgctggcgcgggcggtggccgtcgacgtggcttcgcattcgccgcaggtggatccgatcctcgacgagttgatagctgcgctggccgacctgaatccgaaagctcctgagattccctactattcggcgacgcttttcgacccgcgcgaagcgccggcgtgcgacgcgcgttactgggccgacaatttgcgccacaccgtgcggttctccgctgcggtgcgctcggcgctcgacgacgggtaccgagtcttcgccgagctttcgccgcacccgctgctgacccacgcggtcgatcagattgccggcagtgtaggcatgccggttgccgcgctggccggtatgcggcgggagcagccattgccgctggggctccgtcgcctgctgacggatctgcacaacgctggtgcggcagtggacttctcggtgctctgtccccaaggccgcttggtcgatgctccgctgccggcgtggtcgcaccggttcctgttctatgaccgcgaaggcgttgacaatcggtcgccgggtggctccacggtagccgtgcacccgttgttgggcgcacacgtgcgattgcccgaagagccggaacgccacgcctggcaggccgatgttggtaccgcaaccttgccctggttgggcgatcaccggatacacaacgtggctgctcttccaggggccgcctactgcgagatggcgttgtctgcggcccgtgccgtcctcggcgagcagtccgaagtacgcgacatgcgctttgaggcgatgctgctgctggatgaccagaccccggtgtccaccgtggcaacggtgacctcgcccggtgtcgtcgacttcgccgtcgaggccttgcaggaaggcgttgggcatcacttgcggcgtgcgtcggcggtgctgcagcaggtatccggcgaatgcgagccgccggcgtacgacatggcctccttattggaagcccacccttgccgcgtggacggtgaggatctgcgccggcaattcgacaagcacggtgtgcaatatggtccggccttcaccggcctggccgtggcctatgtcgcggaggatgcgaccgccacaatgctggccgaagtcgcgctgcccggctcgattcgttcgcagcagggcctgtacgcaatccacccggccctcctggatgcctgtttccagtcggtcggcgcgcatcccgatagccagtcggtaggtagcggcctattggtgccgttgggggtgcgccgagtccgtgcctatgctccggtgcgtaccgctcgctattgctacacgcgggtgaccaaagtcgagttggtcggcgtcgaggccgatatcgacgtgctggacgcgcacggcacggtgttgctggccgtgtgcggactgcgaatcggtacgggagtgtccgagcgcgacaaacacaatcgggtgctgaatgagcgcttactcaccatcgaatggcaccagcgtgagctgcccgagatggacccctctggcgctggaaaatggctgctgatcagtgactgcgctgcctctgatgtgaccgctacccggctagcggacgcgtttagggaacacagcgcggcgtgcacgacgatgcggtggccactgcacgacgaccagttggccgccgccgaccagctacgcgatcaagttggtagcgacgagtttagcggcgtggtcgtgctcaccgggtcgaacaccggtacgccgcatcaggggagcgcggatcgcggcgctgagtacgttcgccggctggtgggtatcgctcgcgaattgtcagaccttcccggggcggtgccgcgcatgtacgtcgtgacgcggggtgcccagcgggtgctggccgacgactgcgtcaatcttgagcagggcgggctgcgtggtctactgcggacgatcggcgccgagcaccctcacctgcgtgccacccagatcgacgtggacgaacagaccggtgtcgagcagctggcacgccaattgctggccacgtcggaagaagacgagaccgcctggcgagacaacgagtggtacgtggcgcgcttgtgtccgaccccgttgcgtcctcaggagcggcgcaccatcgtcgcggatcatcagcagagcggcatgcgcctgcagatccgtacccccggcgatatgcaaacgatagagctggccgcgtttcaccgcgttccaccaggaccaggacagatcgaggttgcggtccgtgcgtccagcgtcaactttgccgatgtactcatcgctttcggtcgctaccccagcttcgagggacacctgccccagctgggcacggatttcgccggcgtggtgaccgcggtcggaccaggcgtcactgaccacaaggttggtgaccatgttggtggcatgtcgcctaacggctgctggggcacattcgtcacgtgtgacgctcggctggccgcgacgctgccaccgggcctgggtgacgcacaggccgctgcggtgaccaccgcgcacgccaccgcctggtacggactgcatgagctcgcccggattagggcgggtgacacggtgctaattcactccggcaccggcggggtcggacaagcggcgatcgctatagcccgcgcggcgggcgctgagatcttcgccaccgccggtaccccacagcgtcgagagctattgcgcaacatgggtattgagcatgtctatgactcgcgcagcatcgagttcgccgagcagattcggcgggacactaacggccggggtgtcgatgtcgtgctcaactcggtgaccggcgccgcgcaacttgccgggctgaaactgctcgccttccggggacggttcgtcgagattggcaagcgcgacatctatggtgacaccaagctggggctctttcccttccggcgcaacctgtccttctacgccgtagacctggggttgctgtctgcgacacacccagaagagctgcgcgacctgctcggcacggtctatcgcttgaccgcagccggcgagttgccgatgccgcagagcacccattaccccctcgtcgaggcggccaccgccatccgtgtgatgggcaacgccgagcacaccggcaaactcgtcctccacatcccacagaccggaaaaagcctcgttaccctgcctccggaacaagctcaggtgttccgtcccgacggctcctacatcatcaccggcggcctcggtgggctagggctgttcctggccgagaagatggccgcggccggttgcggccggatcgtgctgaattcccgcacccagccgacgcaaaagatgagggaaacgatcgaggccatcgcggcgatgggctctgaagtcgtggtggaatgcggtgacatcgcccaaccgggtaccgcggagcggttggtggcgaccgctgtggccaccgggcttccggtacgaggcgtgctacacgcggccgcggtggtcgaggacgccaccttggccaatatcaccgacgagttgctggcgcgcgactgggcgccaaaggttcacggtgcctgggagttgcatgaagcaaccagcggacagccgcttgactggttctgcttgttttcgtcggcggcagctctcaccggctcgccgggacagagtgcctactcagcggccaacagctggctggacgccttcgcgcattggcggcaagctcagggcctgccggctaccgcgatcgcgtggggagcctggtcggatatcggccagttggggtggtggtcggcatcgcccgcgcgggcttcggcattggaggaaagcaactacacggcgatcactcccgacgaaggtgcttacgcgttcgaggcgctattgcgccacaaccgcgtctataccggctatgccccggtcatcggagccccgtggctggtcgccttcgcagagcgcagccggtttttcgaagtgttctccagcagcaacggttcgggcacaagcaaattccgcgtcgagctgaacgagctgccacgcgacgagtggccggcgcggcttcggcagctggtcgccgagcaggtcagcctgattctgcggcgcaccgtcgaccctgaccgcccgctacccgagtatggacttgattcgttgggcgcactagagctgcgcactcggatcgagaccgagaccggaatccggttggcacccaagaacgtcagcgccacggtgcggggcttagcggatcacttgtatgaacagctggcgcccgacgacgctcctgctgccgcgctgtcgtcacagtaa

SEQ ID NO: 587 - DNA, 978 bp, Mycobacterium tuberculosis
atgcatcaggtggaccccaacttgacacgtcgcaagggacgattggcggcactggctatcgcggcgatggccagcgccagcctggtgaccgttgcggtgcccgcgaccgccaacgccgatccggagccagcgcccccggtacccacaacggccgcctcgccgccgtcgaccgctgcagcgccacccgcaccggcgacacctgttgcccccccaccaccggccgccgccaacacgccgaatgcccagccgggcgatcccaacgcagcacctccgccggccgacccgaacgcaccgccgccacctgtcattgccccaaacgcaccccaacctgtccggatcgacaacccggttggaggattcagcttcgcgctgcctgctggctgggtggagtctgacgccgcccacttcgactacggttcagcactcctcagcaaaaccaccggggacccgccatttcccggacagccgccgccggtggccaatgacacccgtatcgtgctcggccggctagaccaaaagctttacgccagcgccgaagccaccgactccaaggccgcggcccggttgggctcggacatgggtgagttctatatgccctacccgggcacccggatcaaccaggaaaccgtctcgctcgacgccaacggggtgtctggaagcgcgtcgtattacgaagtcaagttcagcgatccgagtaagccgaacggccagatctggacgggcgtaatcggctcgcccgcggcgaacgcaccggacgccgggccccctcagcgctggtttgtggtatggctcgggaccgccaacaacccggtggacaagggcgcggccaaggcgctggccgaatcgatccggcctttggtcgccccgccgccggcgccggcaccggctcctgcagagcccgctccggcgccggcgccggccggggaagtcgctcctaccccgacgacaccgacaccgcagcggaccttaccggcctga

SEQ ID NO: 588 - DNA, 711 bp, Mycobacterium tuberculosis
atgcggacccccagacgccactgccgtcgcatcgccgtcctcgccgccgttagcatcgccgccactgtcgttgccggctgctcgtcgggctcgaagccaagcggcggaccacttccggacgcgaagccgctggtcgaggaggccaccgcgcagaccaaggctctcaagagcgcgcacatggtgctgacggtcaacggcaagatcccgggactgtctctgaagacgctgagcggcgatctcaccaccaaccccaccgccgcgacgggaaacgtcaagctcacgctgggtgggtctgatatcgatgccgacttcgtggtgttcgacgggatcctgtacgccaccctgacgcccaaccagtggagcgatttcggtcccgccgccgacatctacgaccccgcccaggtgctgaatccggataccggcctggccaacgtgctggcgaatttcgccgacgcaaaagccgaagggcgggataccatcaacggccagaacaccatccgcatcagcgggaaggtatcggcacaggcggtgaaccagatagcgccgccgttcaacgcgacgcagccggtgccggcgaccgtctggattcaggagaccggcgatcatcaactggcacaggcccagttggaccgcggctcgggcaattccgtccagatgaccttgtcgaaatggggcgagaaggtccaggtcacgaagcccccggtgagctga

1.-12. (canceled)

13. A method for the detecting presence of antibodies which specifically bind to antigens of M. tuberculosis and which are present in a bodily fluid sample, comprising contacting the sample with antigens of M. tuberculosis, wherein the antigens are encoded by at least two of nucleic acids Rv1886c (SEQ ID NO: 270) and Rv1860 (SEQ ID NO: 588), Rv3874 (SEQ ID NO: 547), Rv0798c (SEQ ID NO: 121), Rv3804 (SEQ ID NO: 534), Rv2031 (SEQ ID NO: 284), Rv0934 (SEQ ID NO: 587), and Rv0379 (SEQ ID NO: 65), and detecting antibodies which bind to the antigens.

14. The method of claim 13, wherein the antigens of M. tuberculosis are present in a crude expression extract or in partially purified form.

15. The method of claim 13, wherein the step of detecting the antibodies comprises use of a signal-generating anti-antibody.

16. The method of claim 13, wherein binding affinity of respective antibodies which specifically bind to antigens of M. tuberculosis are known and indicative of an activity state of tuberculosis.

17. The method of claim 13, wherein the antigens of M. tuberculosis are coupled to a solid phase prior to the step of contacting the sample with the antigens.

18. The method of claim 17, wherein the antigens of M. tuberculosis are coupled to the solid phase in an array.

19. The method of claim 18, wherein at least one of the antigens encoded by at least two of nucleic acids Rv1886c (SEQ ID NO: 270) and Rv1860 (SEQ ID NO: 588), Rv3874 (SEQ ID NO: 547), Rv0798c (SEQ ID NO: 121), Rv3804 (SEQ ID NO: 534), Rv2031 (SEQ ID NO: 284), Rv0934 (SEQ ID NO: 587), and Rv0379 (SEQ ID NO: 65) is present as an antibody-binding fragment.

20. The method of claim 18, wherein the antigens of M. tuberculosis further comprise at least one antigen of M. tuberculosis that is encoded by a sequence selected from the group consisting of SEQ ID NO:1 to SEQ ID NO:589, or antibody binding fragments thereof.

21. A method for the detecting presence of antibodies which specifically bind to antigens of M. tuberculosis and which are present in a bodily fluid sample, comprising contacting the sample with one or more antigens of M. tuberculosis, wherein the antigens are encoded by nucleic acids selected from the group consisting of Rv1886c (SEQ ID NO: 270) and Rv1860 (SEQ ID NO: 588), Rv3874 (SEQ ID NO: 547), Rv0798c (SEQ ID NO: 121), Rv3804 (SEQ ID NO: 534), Rv2031 (SEQ ID NO: 284), Rv0934 (SEQ ID NO: 587), Rv0379 (SEQ ID NO: 65), and optionally at least one of Rv3864 (SEQ ID NO:545), Rv1980 (SEQ ID NO:281), Rv0632 (SEQ ID NO:103), Rv3810 (SEQ ID NO:536), Rv1837 (SEQ ID NO:264), Rv1196 (SEQ ID NO:174), Rv3248 (SEQ ID NO:458), Rv3628 (SEQ ID NO:513), Rv1284 (SEQ ID NO:187), Rv1411c (SEQ ID NO:589), Rv3616c (SEQ ID NO:509), and Rv0456c (SEQ ID NO:74), and detecting antibodies which bind to the antigens.

22. The method of claim 21, wherein the step of contacting the sample is performed with two or more antigens of M. tuberculosis.

23. The method of claim 21, wherein the antigens of M. tuberculosis further comprise at least one antigen of M. tuberculosis that is encoded by a sequence selected from the group consisting of SEQ ID NO:1 to SEQ ID NO:589, or antibody binding fragments thereof.

24. A diagnostic device for detection presence of antibodies which specifically bind to antigens of M. tuberculosis and which are present in a bodily fluid sample, comprising a solid phase to which antigens are coupled, wherein the antigens are encoded by at least two of nucleic acids selected from the group consisting of Rv1886c (SEQ ID NO: 270) and Rv1860 (SEQ ID NO: 588), Rv3874 (SEQ ID NO: 547), Rv0798c (SEQ ID NO: 121), Rv3804 (SEQ ID NO: 534), Rv2031 (SEQ ID NO: 284), Rv0934 (SEQ ID NO: 587), Rv0379 (SEQ ID NO: 65), and optionally at least one of Rv3864 (SEQ ID NO:545), Rv1980 (SEQ ID NO:281), Rv0632 (SEQ ID NO:103), Rv3810 (SEQ ID NO:536), Rv1837 (SEQ ID NO:264), Rv1196 (SEQ ID NO: 174), Rv3248 (SEQ ID NO:458), Rv3628 (SEQ ID NO:513), Rv1284 (SEQ ID NO:187), Rv1411c (SEQ ID NO:589), Rv3616c (SEQ ID NO:509), and Rv0456c (SEQ ID NO:74), and wherein the device is suitable for detection of the presence of the antibodies according to claim 9.

25. The diagnostic device of claim 24, wherein binding of the antibodies is indicative of active tuberculosis.
